United States Patent Application Publication US 2023/0106033 A1 - sequence listing, part 2

SEQ ID NO: 1 - DNA, 6239980 bp, Clostridium beijerinckii SIID27451-B11 (residues 2,079,995-4,159,988 of 6,239,980)
ttcgtaggataagaaagctcactcagacgagttgaggagtacaattctttgaactaaattatagaattagaaagaactaggaagagagagggaggcgctgaaaacccttatgcaagaaattttgaaggtagcttttgagcttctttagtgaaataatagtagctaaagacggtttgtctgaatcgttatttaaattaagagtccattaatgcagtaattatgtatatgtggaaataaaggtggtaccgcgagctttcgtccttttgtgatgagggctctttttgcgttgaggatcaaaattttatattttgttcttggagctttcgctgtaggtattttatattcgtttattcgaaagcccaaagtgaatgaatgggagtcatgtttaatttattaagacacagcaattgcagtgcatatgctaaagaatatatattcttaggaataaatattctttacaatatttattgtttagaatataaaaatttaacaagttaattgttagtttaactaagtttggaggaattaaaatgtcagaagaaataaaaaatatatcaactacatatgatccaaaagaatttgaagataggatctataaaaattgggaggagaagggatactttactccagtaatcgataagaataaaaaaccatatacaataatcatgccgccaccaaatataactgggcagcttcacttagggcatgcatttgacgatactcttcaagatatgcttatcagatttaagagaatgcaaggatattgtacattatggttacctggagaggaccatgcgtcaattgcgacagaagttaaagttgcaaatcagttagcagaacaaggttatgataagaaagaaatgggaagagaagcattccttgaaaaagtttgggaatggagtgacaagtatagagctacaataagaaaccaagttaaaaagcttggagtatctgcagactttacaagagaagcatttacaatggatgaaaatcttagtgcagctgtaaaacatgtatttgttaagctttataatgaaggtttaatttatcaaggaaatagaattactaactggtgtactcattgccaaacagctttatcagatgcagaaattgaatatgaagaacaagcaggtcatttctggcacattaactatccattagctgatggatcaggagttcttgaaattgcaacaacaagacctgaaactttacttggagatagcggtgttgctgttaatcctaatgatgaaagatataaacatttaatcggaaaaactgtaatattaccacttgtaaacagagaaattcctatagttggagacgattatgttgacttagaatttggaactggtgcagttaagatgactccagcccatgatcctaacgactttgaagttggtaaaagacataacttagaaatcataagagtaatggatgataagggaattatcaacgaaaaaggtggtaaatataaaggtctagatagatatgaagcaagaaaagccatagttaaggatttagaagaagcaggtcttttagttaaggtaaaagatcatgctcataatgttggaactcatgatagatgcggaactacagtagaacctataatctcaaaacaatggtatgttaagatggaaagccttgcaaagccagcggtagaagtagttaagaatggtaaaactaaatttgttcctgaaagatttgataagatatacttcaactggatggaaaatatccaagactggtgtatttcaagacaattatggtggggacatagaattccagtatactattgtcaagattgcggagaaatgatggtacttgaagatgcaccaaaatcatgtactaaatgtggaagctctaatattaagcaagataatgatgtacttgatacatggttctcttcagcattatggccattctcaacacttggctggccaaacaaaacagaagacttagaatacttctatccaacaagtacattagttacaggacatgatattatcttcttctgggttgctagaatgatattctcaggacttcactgcatgggagaaactccatttaatacagttcttattcatggcttaattagagattctcaaggtagaaagatgagtaaatctttaggaaatggtgttgatccgctagaagtaattgaaacttatggtgctgatgccttaagatttatgatagctactggtaatgctccaggaaatgatatgagatattatcctgaaagggttgaatcatcaagaaactttgcaaataagatttggaatgcttcaagatttgtaatgatgaaccttgataaagaagtgatgaacagatataaagactgcaaagaatattctttagctgataagtggatattatcagaaatgaatactttaataaaagaagtaacagaaaacatggaaaaatatgaacttggaattgctatgcaaaaagtttatgactttatgtggactgaattctgtgattggtatatagaacttgttaaacctgtattctatggtgatgatgaaaaggctaagggaatagtttataacgtattaaatacggttttaattacaggattaaaattactacatccagctatgccatttataacagaagaaatcttcactcacttaagtgatgaagaaacaataacaacttcggcttggcctgaatttgatgaagctttagtaaataaagaagcagaagatgatatggcatttgtaattgaagctataaaaggtttaagaaatgttagagctgaaatgaacgtaccaccatcaagaaaggcaaaagtaatctgctatatagctgaagatgctaaaaaagcatttaactcaggtgtggcatacattgaaaagctagcgtctgcatcagaagtagaatttataagtgataaggctaatgttcctgcaaatgctgtatctttagttgttaaaggtggagaattattcatgccactacttgatcttgtagataaagataaggaattagatagattaaataaagaagcaaagaaactagaaggagaaattgatagaatagacaaaaagttaggaaatcaaggtttcgttgctaaagctccagcagcagttgttgatgctgaaaaagaaaagagagttaagtatgttgaaatgttagaagctgttaaagtaagaattgaagctttaaaataattttaatgaaattcagtaaaagatattactaagttccttggaacttagtaatatctttttatttctttaaaatttatatacattcaaagataagggagattagagtatataaccaaacatgcactaaattattaactgcacaataattttaattatcatatagttagtaagataaaaagttaaaaatttttgaaaggtaaggatataataggaggattattaatatatataattctagaataatatatatggagggtttgaattttgaaaacgagaaggcatttacttaacttaattttttggatatccttatcaatcttatttaatattattatatattacacaagaggtgaaacatcagcaatagaatactttggtggttacatagtagagatgtcgttaagtttagataatttattcttatttctaatgatattttcaagttttagaatacaggaagaataccaggaaaggatacttctatatggagttataggagctatggtgttaaggctgattttcattttacttggcgtagctatagtgaataaatttagttttatattatctatatttggagtattattgctgcttagtggtgcaaaaatatttcttagggaagatgataatattcaatttcatgataacttggcagttaagatattaagaagaataatgcctataacaaatgttttacatggaaataaattttttgttaggcagaataagattatttatgctacacctctttttatagtacttttaataatagaattttcagatattatttttgcaatagattcaattccagctattttttcaataacaacggatactttcatagtttatacctctaatatttttgcaattttaggacttagaagtatgtactatatattagaaaagatgaataatatgttcaagttcatgaaatatggagttggatgtatattaatttttactgggataaagttagtaatattgttttgggaaattgaaatttcagttacgaattctgtattaattatattatctattttattggctagtatattaatatctctattatggagtgaatttgataagtttagaaattggtgtaaaagaagatcataaatattataaaaaaggcgcaaagccacaatacggatattaaccacagttgcattcgattttgttcttgaagaattatagaataaatttagtccagagatgtttttgtttagcttttaattagtcatttcactagaattaagatataatgtaaagtaaatacatactatttagaatttgcatttatagaaaaacataaaagacaaagaggtaagaaaaatgagcatgacttataaagacgcaatggattatattacaagcgtggggaagtttggatctaattatggacttgaaagaacttttagaattttagagttacttggaaatccacatgaaaaactcaaacttatccatattgcagggactaatggcaagggatcaactacagctatgatatcaaaaatattaattggaatgggatataaagtaggaatgtatacatccccatatttagaagaatttgaagaaagaattcaaataaatagcagtaatattagcaagaaatcattagtagacttagtggaagaaattaaattagtggttaataaagtaattgaagaaggatatgaacatcctactgagtttgaaattataactgctttaatgtttttgtatttttatagagaaaaaatagattatggagtaattgaggtcggtcttggcggaagattagattctaccaatgtactaacacctaaggttagtgtaataacatcagtaagtttagatcatataaatatattaggtgataatttaaaagatattgcaaaagaaaaagccggaattataaaagaaaatgtaccagttgtactctatcctcaaaaaaaagaggctgaagaagtaatattaaaaatagcggaagaaaaaaactcaaaagtatattttgtgaataaggaaaatggaaaattggttgatatcaattatgatgacttttatcaaaatgtagttgttaaaagtattaaaaatatatataagattaaatttcctttgcttggagaacatcaaatattaaatttgggagttgctttaagcgcaatagaggtgctatgcgaaaatgaaaaaatagaattaaatacaagcttaattgagaaagctttacaggaagttgtatggataggaagactcgaggttttaaaaaagaagcctacgatagtaattgatggggcacacaatatagatggaatcaaagctcttagaaaaaatatagaaaagtattttaaatacaataaattatatttgttgcttggtattttagcggataagcaagtaaaagaaatggtacaggaaataacaccattagctgaaaaagtttatgcacttacaccacatagtgaaagagctgaacttagtgaaaatttgaaagaggaaatattaaactataattcaaatactattgcattagaaagttatgaggatgctttttctttagcattaaaagaagctaaggaagaggatttaattgtagttagtggatcattatacatgattggagatatgagaaaaattataagaaataagtttcctaataagtagagttggggcacataaatattttccgaattagtctaaatgaatataaatcaaaaaattccgaggcgagcttcggaattttgattaaaaggagtagtgaaagttatatggttaagatagaaatagaaaacgacattaataataagaactcaatctattatgatttaaaagaatttcgtgatagaaatccagacacactatatagctatcaagactttgaagtggctggaagaagggagtttaagattattacgaacaaagttcgtaaacttcaggattatgagaagaatagattagccagtgagctagtgggacatctatataattatgcgttggatgaaggaaagttatcaagtgtccatgattatattacattaaatccaattatcggttactatgaaaacttgattaaaatcttcaaagactcgatggagagtaataaagagatattgaaagcaatgagcaagagagtaaataatttgcttaaagagagttcgtattcagaagaggtgaaactagggatactactttcgcctatatgcagtattaaaaacttgaaggatatattaaatgtgttttctattcataatgaatatattttctatacaatcaaggcttatgagtatatcggaagttgtaataatataatttttgaaatttcaaagaaatctaaaggatatggaaagatattttgtataatgaatcttactcctacaacttatgagataaaaaaatggatgatagaagaaggtagtgataatagtgttgggattacagaattattatcttacactatgctttcattagatcttttgagctacttggaggatacaaaattttctgaaggagagattgaagtttttgcaaaatctttcagtacattgctttcggactatagtttggatgatattaagaattcagcaaaagtttgcaataagttattagaaattattgataatataggtggtggcatatattcgttatatgctgtaatttcaattttatattcaatagaagctattattattgatgaatataagaataaaggaaattcaaattcgtataagttaaataatgattacaaagaaataatagataattgtaaaaaaatttgcaaaaaagagttgtggcacaatgtaattgccaatgaagttccaaatatagaaattgaaagtagtgtattaataagttgtgcagatagaacgaagtataaattaaagaaaagtgaatttgaattaattgtaaaaagagattataccaatgcacttttatataaatatgcattttccattgggaataaggctataaaaaaatgtgcttttaaattaggattaaaaaaattaccaatgaccgaaatactaagcggacaagatgaattaaaaatagaaaatctactttatgaggatatagcacaaatttgtttctttataattataaaatatgcacaatatgaagattttatagatgaatataaggatattaactttcaggcgctaaaatcacctttaattgagactagaattcaagcggctgcaaatcttcaaagatttaaagaagagtttgattcattggataaagaaactattaaggacgctattagcacagagattgttagtgatgtacgaagagcgttaaattcacttttaattaaatcaagtagcaaaaagaataagaaatatgttgaaatagatgagaatatgcatattgatgctcatgttaaagatatatatttaaccagtgtaaatattgctggaacaagctattttgatatgagtgaaatataccataaattattagaagatgatatggtatatttaaaaagagattttgataatgaatatgataaaaatgcgattgaagttataacaactgaaggatttgtaatggggtatgttccaaaagacaataatttaatattaaagaatttaatagataaaggtaaatatctttatggaaaagtagaagagataagcgaagattatagtgctataaaaattcaaatatatctaagttataaagatgtaattgaggaaataacaagtactttatcattactatcaggggagagagaagattacttgcaataaaaatagtacagattgaagtttaataaaatgtaaaaaccatgcataaaaaagaagattttctttacttatgcatggtttttatgttagcaaaattgaataaattattgctagaactttatagtctattttttagtttatagaattttctttcttccaagctaatagtgcttttgatagctgatcaggacaagatgttcctttatttctgcaatctattccgcctaatctttttattatatcatccacaggcatacctttaactaattgtccaatgcctaataagtttccagcacatcctccaacaaattcaacatctttaagaatattattctcaatttcaagatttatagtagatgaacaaacaccagttgttttatatgaaaacattccacacactccttaagataaaatataactatatacatgaaaagtaagcagctataataattcgcaaaaattacttactttgaaaatgtaattagttaacctccatttattatacaagaaatttgtcaataaataaagataatgaagttaataagttgtaccaataatatatattcagaatatattatagatagtagaatgattatcttaaaagggggggatggagtgagttatattgttttatgcaatactggttcagatagtttaaataaaataaatactgagaatctaaatactcaaaatatagttttatctattggtgaaggtccatttggccctcatggattatcattatataaaaataagctattagttgcgaataactataataatagcatatcgttgatagattttaatagttttaaagaagaaggcaatatatatgtaggagcgcatccaaatgatatagtggcttataatgatattgcttatgtttcatgtggagaatctgactctttaataatatacgatttgctaaatgagaggattaatttcgaaataccaacaggaagatttcctcataatatcacattattagaagatagaaattcagtttttataagtaatatgggagatgacagcatatctataattgactatataaataataaggagataaaacgaattaaagtggaaaatactcctgcaaagataagcgtatcacaaaataaaaaatacttatacgtatgcatgagttatcttggtcatgataaaaatggtagtattggaataatagatttaaatactcttgaattaataaataaaattcaagttggacactcgccagtagatttatttgaagaagacaacttcctatatgtttctaatttatgtgatggctctataagtatagtaaatttaaatgaacttaaagaagaggaaaaaattaatattggcggaatgcctagaggaatagtaaaatctagagataacatatttgttggagattttttgaatggagtactgaagataatagatatgaaagataggagaataaaaaccataccaataggaaatgaacccaatggtatgactttaacttagacatatgaaagaaaataacaagtccaaaataccatgattatttttcatcaggcaaggaagtagaatgggctcatagcggtctattagggcaatctgctgatgaacagagaacccaaatctatgatttggtgtgaatcgcttactcagtgagcgcatgcgagtcgagcttccaatggtggaaaataggcgtggcagatggaactgttatttttttgattatgtcttaaatcgataaaagtaactttaattaattaataaacttattatattggtataaatctcagaaggattttctttccatttagcacaaattgaagtagcttgatttttagatggaactgataattttaattccattaataacgagtcgttttctacagctttaaggttaacgataaaactatcgtttgcacctaatgtgtaatcagagtgtatagttaattccttttttatagactctattttttcttttatatagtcattaatagtagacatttttgaaggggatattctatctttaaataaagagagaacattatctcctttttctgttaatatcaataattttttatcattcacatcatgatattcaacgaatttagattcctcaagctctgataaatattgctggaatgtaaaataattaataaagttattttcaagaattatttcagtaagctgagtatttgatataggattttttattgattttaaaacatataacattaataacttattttctgctaattctgatgaactttcgtacataattacctccataattgatgaaaatctccttttattataacacaaatttttttttagtgaataggagtatagtataatttataagtttaagtttacttaatagcataaaaaaatatgtaatgcatatagtttaaatataaaatataaagttaaaaggagcatggaaggtgacgtggaagaaaaagagaatcggcattgacatatttttgattatctttttagtgtttatatctatagggattagcaaagcgatacaggcaatgggtaatattcaggaagaagatcctatatattgtgttgatactaatgaaaaagttattagtttaacatttgatataaattgggcagaaaaagataatttgaatgtaatattagacatattggacaaatataatgtaaaaggaacattcttcataatgggaggatgggtaaattatagcgaggacaatgtggagaagcttaaggcaataaaagagagggggcatgaaataggtaatcatagctacaaacatcctatgttcactaaaataggagcagatagaatgaaagaggagatagaaaaaactaatgatacaattgaaaaatatacaggtgaaagacctaagttatttagatttccaagtggagattataataaagaggctttttcaaaagtaagaaacctaggatatgtaccaattcaatggagtgttgattctgtagattggaaagaggtatctgaagaaactgaatataacaaagttatgaaaaacgttaaaccgggatctatacttctttttcataataatgcaaagtatactccaaataatttagatagaattattaaagaactaaaggataaaggatatgagtttaaatcagtaggtcaaatgatatattcagataactatagtgtagacaatcaagggattcaacataaagtgaaacttgattcagctggggctgaatcttagctgaacttataaccccaagggtcataatgtccagggactagtgccacttactactatttttaaaattgtgatttattaagggcaattagtcatcggataaaaataattaatatttattgaaaataaactagtttttgtattataatggtaatatatgctagtgggagcatatattacacaaaataaaataatttccgatggagagagggattacaatggataatttgatgttaaataacaaaatttaccttgaaggcaaggtaacatctggattagagtttagtcatgaaatgtatggggagggtttctacacttttgatttagatgtaatgagattaagtgattcagtagataaattaaatattactgtttcagaaagattactaagtgacataaagcttgatgagggtgtagaaataattgttgaaggtcaacttagatcttataacaagtttattgatggatctaacaagctaatacttactgtttttgcaagaaacattgaaccatgtctagaaagaagtaaaaatccaaatgaaatatttttagatggatacatttgtaaggagcctatttatagaactacaccatttggacgtgagattgcagatgtattacttgccgtaaatagagcatacaataaatcagattatattccaactattgcctggggaaggaactcaagattctgtcaaactttaaatgttggagataatattaaggtatggggaagacttcaaagcagagaatatcaaaaaaaggtatctgatagtgaagttgtgaaaaagattgcatatgaggtatcaatctcaaaaatggaaagagctaataaggaagagagcactggagaagagggcgcagtatagaattgtttatttaattaaaatgaatattctaaattcgaaaaagctataagcattatgtaatataaaatatagtattttttctggtaaataaaaaggtttcaattaatatagatttattgaaaccttttatttaattatgcaaagcagctagtgtattaatttcatacatttgctagctactttctccataatatattatgtaattttgaatttctaatagaaaataattactttcttaaatcatctaatatttgagttttgtcttttgtcttgtcatccactgccttgattatcttagcaggtgaaccagctacaacaacgttgtctggaacatcttctgtaacaacagaaccagcagctacaacgctacctgcacctatcttaacgccttcaaggattacagaattagcaccaattaaggcattatcgccaatcatacatggttctttgcttggtggctctaatactccagcaacaacagcaccagcacctagatgaacattcttacctaattgtccacgagcaccaactacagcattcatatcgaccatagttccatctccgatttcagctccaatgtttattactgcacccatcattataactgcatttttaccaatagtaaccttatctctaatgatagcacctggctcaattctagcgtcaacttcaagtaaatctagcattggaatagcagaatttcttctatcattttctattctaaagtgttttataagatgtttattatctaaaactattttagttatagaatcagattctcccattagtatataaaatccgttagaaccgtaccactctacatcattcatttcagcattgcttaaatctccattaacatagacttttactggagtagatttttttgattccttaataaatctagcaatttcataaggatccgttaaattatatgacattatatcaccctttccattattttcgcaatcatccttattataataaagattgaacgcaattaaaaggggaataagtaaaaaaacacaaatagtttgaatcaattttattaatgaggtaaaataagtttatattgcaaaacgggggcgcataaattatgaataaacaagtagagaaaatacaaatctcgggaataagaagatttgccgagaaagttaagaaagttgaaggagcaatatcactaaccatcgggcagccagattttcctgtgccaatagatatatcggaggctatgattcaggctataagagataataaaacagtttatacatcaaatgcaggtgttgatgaacttagagaagaaatctgtaattacttaagaacatttgatattgaatatagcaaagatgaaatatgcataacagttggtggaagtgaagggttatattcagtattatttgctattatgaattcaggagataaaatattaatacctgggcctgcttatccggcctatgaaaatatctctataatgataggagcagatgtagtaacttatcctctaaatgaagatttcacattagatgtagacaaaattaaagaaaaattagagagtgaaaatattaaggtattaatgctgtcatttccatcaaatcctacaggggcaattttatctaaagagcaaagaaatcaacttgttgaattaataaaaaataaggatatcatagtaataacagatgaaatgtattcgtccataatttttgatgattattattcaatagcgcaggcaagagaaataaaagataaagttatatatgtaagtgggttttccaaaatattttctatgacagggcttagaataggttatgttgcgtgctgtgaacagtacatgaaagaaataatgaaagtacatcaatatggtgtttcgtgtgcaccttctattgcacaatatggagttattgaagggctaaaaaaatctttagatgatgtagaaaatatgagaaaaacttttgaaagaagaaaagactactgcttgaatagattaagggatcttaatttggaggttgcagaacctaagggagccttttatatatttccttcaattaaaaagtttaatatgtcttctgaagagttttgtgaaaagttattaaacgaaggaaagcttgcttgtgtaccaggtacagcctttggtgatttaggggaagggtatatgagaatttcatattgctatagtgatgaaattttaaaagaggcatttgacagatttgaaagatttttaaaattgaattttccaaattgctaattaaagaattttaaaaataatgaagaggtaaattttattaactttttatttttacaaaatctttatataaataaaaatatatagggggcgtcacaatgggtgaatttaaaaatgtaacagcagttaaaaaagcaaatatgtattttgatggaaaggtaactagcagaactatcatatttgaagatggtgaaagaaaaactttggggataatgttacctggggattacgaatttggaactggagacaaagaggtgatggagatcctaggaggatcaatggatgtaaaattaccaagttcagataaatttgttacatacaaagaaggagatacttttacagtgcctgcaaactctaaattcagtctaatagtaaaagaagtagcagattactgttgctcttatattaaagaatagtcaatgtattaaaaatacttataaagatatagatatgaaagcatttgtttttacaggtgcttttttcgtgtgccagcatgggcacttgctaaacaaagaaaaactcaataactatccgaaataggcttaagtaaatttagcatgtaattcattataactactttttactgtgttacgttgacacaatatttatttttttgttagtattatatcatcaaaacagaagattaaatattaaaatatggtgcaaaatatcgcaatgtcttcaagcaaggattattataaaaggtgaatgtatgaaaaagataatgcatgaacaattaatttatgaagtactttcagttgtagaagaaattcctgaagggaaggtagctacatatggacaaattgctattcttattggcagagacaaaaatgcacggcttgttgggaagattcttagtcaggcagaattttatgggcaatatccatgtcatcgtgtggtaaatcatgctggaagattggttccagggtgggatgaacaacgatttctgctattggaagaaggtgtatcctttaaagatagtaatcatgttgatatgaagaaaaataagtggaaatattagggcggagatgcaagaacaatgaatagaattatttaaattaggttgattcgctttaatagaatatttaataatacaaggagatgtaatattataaatgcttatatcacttaaaataagtaatataagcatttataatatgtttcagtggaatttagatggttattattcttagaatcatccatctaaattcctagaaactatagtacatttatttattttaattagtaactaatttattgaattcctataacatcactcatgtcatataatccaggattagttacagaagccatatattcacacgcttttagagcaccaactgcaaaaacttctcttgaaattgctttatgagttaattctattacttcaccagttccagcaaaaataacatcgtggtctccaattataccaccgcctctaactgcatgtataccaatttcattttcttctctttttgaatttccttctcttccatagatgtactttgttgtatcttctatagaattttttatggaatcagcaagcataattgcagttccacttggagcatctaccttttgattatgatgcttttcaattatttcaatatcatagtttccatagagtagaggagttactttctttaaaagagaattaattaaattaataccaaaagacatgttacctgatctaaatagtttaagagtactactcttttcatctattaaagttaaatcttcttgtgtaaatccagttgagcatattactaatggtttgttagttttttctgttatttccaatagactatgaagagcatcagctcttgaaaaatctaataaaacatcatattcgatatttaaatccttagtgctttcaaagataggatatggagcattacttggaaatttatcaattccagcaacaatctctaagttcttaaatttatcagcgcactctgtaatcatcttacccatcttacctgagcaaccatttaatactatttttatcatattatcaccttatatcaatttataatctagcaaagcagcttttagtatttcctcattgttactatccatttcacaaagtggaagtcttaaaggcccaacatctaggcccataaggttcatggctgttttaactgggattggatttgtttctaaaaataaagtatttgctaaagataaagtgtctaattgaatatctaaagcttctttaaaattattagataaacattttttagctatttcatgaactttatttggaattatattagctaaaactgaaattacacctatacctccaatggacattatagatacaatttgatcatcattaccagaataaatatctatagaatctctgcaaagttccttcatttgaagtatttggctgatgtttccgctagcttcttttatcgcaacaacattgcttaattcagcaagcttaactaaagttttaggtgcaatattaacacctgtcctacttggtacgttataaagtacaataggagtattaacctcatcatttatagctttaaaatgttttattaaaccattttgagtagttttattgtaatatggtgtaataacaagaagtccatctactccaacgctttctgcatatttactcattgaaatagcagcagcagtattgtttgaaccggttcctgcaattacaggaattcttttgtttattacatcaactgtaaatttaattgtatcttttttctctttttctgtcatagtagtagcttcacctgtagtaccacaaattacaatagcatcagtaccttctttaacgtgccattctaataaattcttaagtgattcaaagtttattccattttcattaaatggcgtaactatagctacagctgagccttgaaatattgacattcagattcctccaacttaattactaagaactatttattatcttttatcattatttcagcaatttgaatagcattaagtgctgcaccttttcttatgttatcaccaacaacccatagatttaaaccattatccacactaaaatctcttctgattcttccaacataaacgtcgtcttttcctgaaacttcaagagcagttggatattttaattcgtctactttatcatatacagttacaccttgagtgtttcctagtaattcaaaaatatcttttacatcaaattcagagttaagttcaacattgatactttcactatgtccgttaagtactggaactctagctgtagttgctgttactcttaaatctggctcgtgtagaatttttctagtttctttaatcatcttttcttcttcttttgtgtaaccatcttctaaaaacacatctatatgaggtaaaacattaccagcaataggataagggaacttcttaggtgcaacccctttaacaccatcctctaaatctcttataccttggataccagctccagatacagcttgataagtagagtatacaattcttttaattccatatttatcatgtaaagccttcatgattggcatagcttgaattgttgagcaatttggatttgcaattattcctttatgaagtttgatatcttctggattaacttctggtactacaagtggtacctcagggtccattctccaagcgctactattatcaattactacagccccatactgtgcaaaaacaggtgcaaattctttactagcatctccaccggctgaaaatagtgcataatctatttttttatcttttatattcttttcacaagtttcctcaacaacataatcctttcctttaaatggtaaagtactaccttcagatctctttgatgcgaaaagatataaattatttactggaaaatttctttcttctaaaatttctaaaaattttcttcctacatttccagtagccccaactattgcaacattatacacaataatccctcctaaatttatttattaatatttttatatatacaattactatagttaaatattgaataaatatcaagtcaatgagcaaaataagttgaaaaaaactattcataaacaattatttattccattaattaggggggttatgaaataatgtgtatatttatgcatatatatgcaagaagttgaaataattattaagtagttattagtacatataaattttataaaatattatagtttagatgtaatttttgtaaaaatatatttttatagaatagtaaagtgatagaaggaaataatattggatgaaaagataaactttacaatttatttttatagttaattcaagtaacttagaattttttttatttctttatttttttataaataaagaaatattaataaaaaactaattattaagattggtagggataaagaatgggtaataaatctgtaaaaaagacaataaaagcaaaacttaaagcaaataaagagcttactgaagctgaaaaaatgagagaaaaagttaaatatgaaattgcagaagaacttggtttaatcgataaagttaataaagaaggatggggcggactatcttctgaagaaaccggaagaataggtggaataatggctaagagaaaaaaagcgccaaagtaaatgacaagcttctatatttttactaatttgactaagtaaataattaagatataatatattagatgaattagtaaatttacgttaagggcgtgataaagcagatggcttataaagagtttgccaacatatatgatgaattaatatatgaggatattaattatgataaagttgcagataagattataaatatatgtagagaaaataatttgaaatttgaagattatttagatttggcatgcggaactggaaatgtttcgattaatgtagcaaaatactttaaaactgtttatgcagtagatttgtcagatgatatgttaaatgtagcttttgataaatttaaaaagaataagattaaagcaaaagtaatatgtcaggatatgtgtgagctaagtttaaataaaagatttgatcttataacttctgttcttgactcaactaattatataacagaggatgaagatttgcttgattatttctcaaatgtttatgaacatttaaaagaaaatggtatatttatttttgatataaattcgtattataaactttctactgttctcggaaataatatatacacttacagttctgaagaaattttttatacatgggaaaattcatttgaagatgatgtattaaatatgtttttaacattcttcgtaaaaaccgaaaatgaactatataaaaaatttgaagaagagcattttgagagagcttataaagaaagctatatagaagatatattaaaaaaatgtaactttagaataataaataagttttcaggatattctgatgaggaagtaaatgaaaatagtgaaagaatactttacatagtaagtaaataggagatgagataacaatggaagataaaatagttagagcaaccgctaaaaatggaatggttagaataatagcaggaatcactacgaatttagtaaatgaggggagtaaaatacatgaatgtacacctgtagcctcagcagctttaggtagaatgttaactgcaggtacacttataggaactacactaaaaagtgaaaaagaagttgtaactttaaaaataaatggcaatggagaaataaacggaataacagtaacagcacatagtgatgcatctgttaaaggatttattggaaatccatatgttgatatgcctcttaatgaaaagggaaaattagatgttggaggagctattggaacagatggtattttatatgtaataaaggatttaggacttagagatccatatattggacaagtgccaatacaaactggagaaatagcagaagattttgcatattatttcacagtatcagagcaaacaccatcagcagtgtcacttggtgtattagttgatcgagatttatctataaaagctgcaggtggattcatagtgcaaatgatgccgggtgcagatgaacttcttgcagatgttataacatatagattagaagaaattccaccaataactacattaataagtgaaggaaaaacaatagaagaaattttggagtatatttttgatggaatggatttaaaagtattagattctttaactccagagtataaatgtgattgttctagagaaagagttgaaaaagccttaatatctattggaaaggaaactcttcaagagatatatgatgacaaaaagaatgaggaaatagtatgcaacttttgcaatactaaatatgaattcacaaatgatgaaataggagaattattaaataatagtagataaacatactaaaattatagaataaaaataataagaagatacagagaataatttggaagactatgaaaaaagcagattattctcttttttcgtgcataaatattatagcagaatattttttattttaatgaaggagtacatgttatgaaaaaatttttggatattatctttggtatgattattatagtatatattgcagtaataaatattataagcagctctaaaatctcatttagtattcctatttttattttaggagttactttaataatatatcattttattaagaggagaatagaaagtaataagcttatatataggtattttaaagttttaaaagtactaatttgcataggggttatattttttttaggaatagaaatttttataattaattatcctaaatataataaggggaatgcagattatattattgttttgggagcaggacttgatactaattctaacccaagtttaatccttcaaggaagattggatgcagctttagaatacataaaagaagataattatagatttattgttttatcaggaggacaaggatctgatgagaagcttccagaatcacatgcaatgaaaaaatatttattaaatagaggagttgatgaggagaaaataataattgaagataattcaaggaatacagatgagaatcttaaattttcaaaagcaaaaatagaagagaatagtgggaaacctctagataaacttaatattaaaatagtaacaagcgatttccatgctcttagaagtagtatcttagcaaagagaaatggatatgtaaattatagcaattattctagtcacactgcatggtatttaattcctataacatatacaagagaagcttttgctattgttaaaagtataatatttgattaatattaatatacaattgaattttagtagcttgaaaggatagcgtaaacaatgaggataaataaattatttagtaactatggaatttgttctcgaaaggaaacaaatagattgattgaagaaaagagaattattataaatggaagatattgtgttgagggacaatgggtaaatgattcagatgaaataatatttgacggcaaaccaatttctacagtggaaaaagtatatattatcttgaataaaccagttggaattacttgtactgcagagaataaagttagtgataatataatttcctatatgaaatatccacactacatatttccagttggcagattagataaagactcgcaagggcttattttaatgactaatgatggcgaagttgctaataggattttagaaagtgataatatgcatgaaaaagaatatttagttcaagtaaataaaaactttgatgatgaatttttaaagaggatgtctgatggagtggagattacaggaaataaaggttctggtgttagaaggataagtgataaattaggtttatataagaaaacagaagataaagaaaatctactaggggaagaaaatctaggtgactcatccatagtacagttgaaagaattgaaaaacatagaacgtgaaaaaaataaatttgttaaaacaagaccatgtcaagtagaaagggtagatgataatacatttaaaattatactaactcaggggatgaataaacaaatccgtaagatgagcggaactttaggttatcaggttattaaacttgaaagaattagaataatgaacataaggcttaatgatctggagataggaaaatggaggtacttggaggaaaatgaaataaaaagccttaaaaatgaattgtttaggtaaaatatattttagttaacactaatttttggctaagattgataagtatataagtaaactttattgaaaaggatatatccctatgagataattaaattaaatatagtaaagttacagttaaaattatgagtaaattctataatatagggatagggagatttagcctttttattataaaaaccactatatttttgaaaaaatattttgattcacatggagagacagtatgaaaaaagaattgataaaagcaattgaagcagcagaaaaatataatttatttttaaaggtagtaacatcagttagaagctacgattcgtataatagtttttttaatatttacgatgagcatgaagaggcgtgcagaagaatagttgtacttactaagacaaaagaattggaagaagtttatgatgaagatccaacggaggaaataaaagaatgcaaaatagttcaaggtaatttatggataaaggattattccttgttgacgaatccagataaaataaatttatcaagtttatatgttattcagaatttggttgaggaactattatgaaaataaagaaacgtctaaccatttcaaatatatttatgttaattatacctgtaattataatatttaacgtgagttcgaaaagctagaatattttatgggtaaatatggttatgaaaaaaagcaaaaaagtatccttgtaatcttgtggttcgatattccaattattccatagttagatatttgtccaacttaagagaaggtttcttaggaagaaaactatacgaaatcaatcctgaaactatattaaccgcaaaattagtaaaacttctatgtcgattatgctctatctgacatatattttttagttggtcatttattgtttcaatgatagctcttttcctaagaagaattttatcctccattaacattaatttatttttcatgtttttctttatctttgttataagctgaatacctttggaatacaaaatatcggagatctttttagataaataacctttgtcaccaaaaagttttccaaataaatcttttgctaatatttctatagtcttaatttctctatcatctacatttcccggagttagataaaaagagagaatatcccctttatcgttaacaacaagatgaagcttaaaaccataaaaccagcccgttgaacttttaccacgttctgcaattcctttaaaaaccttatgagagtgtattcttctattatggcatacattcaaagttgtagaatcgataaaagaaattcctgtgcacttgccagttctaaatttcatcatgtataatagtagtgcaactaatgattgttgcattaattcaataaacctattgtagctaacaagcttaggaaaatacggtttgagaacagtagacacatgctcaatatagtatgatttaaaagttctgtaatttgacaaatgaaagtagatagttattgtcataacttcgcttaatgataaagttttacttttaatcattgcaaatttgcggtcgctattttccgttaggaaatgacttttacagtaattttcaaatccaatacaaaaattgtctacatcataaaatatttctactaataagttttgcataaaatcccatcctttgttttatttatttggtcgtacttatataataaaacattttgatgggattttttatcccttaaatttttccatcgaactcacgttatttattattgcggttataatgaatattccattctcaaaggcctatgaaaataaatttgaaacttatagagagcatgatcagtatgcttatttcattcaacaaagtttaaaaccagatatgagaaatatagaaaataaaaatgatttagataaatttccggaacaattacagaaatttcttgatcctaagggatatcacctaataataacatacgatggggaaattgtttcatctaatattgaagataaggataaagaagctatttcaatgataggagatgatgttctttttaaatctaattcattagttttagagatgaactccatatccttagttaaaaatagctttgttaaggataataaagtagtaaatattattgcaataaatccatcatataaacctgtaaggattgacataaaaaatgaaatgtcaaatttggtaataagctatataataatagttattatagtttcactaattgttgttacgataactaatgttatactatccagtaagatttataagaaattgattcgccctttagaacttttaagctatggagctgaacagataaaaaacggaaatctggactttgaaatgaattatgaaagtgatgatgaatttggacaagtctgtggtgattttaatgaaatgagattaagattaaaacattcggtcgatatgcagctaaaatatgaagaagatagaaagcaactagtggtaggaatatcccatgatctaagaacaccattaacagcaattaaaggttatgtggaaggattacgtgatggggtagcaaatactcctgaaaaacaaaaaaagtatttagacacaatttatactaaggcttgtgatatggatgtattagttgatagtctgttccttttttctaagttagatacaggcaggtttccatttaaatttgatttagtaagtattagggaatatatagagagtttttacaggtgtgctaagaaagagttttatggaaaaaacgttgaaatttcatttgaaagtaaatgtgagaattcaacattagtgaaactcgattataatgaaataaatagagttcttctgaatatattggataatagtgttaaatataagcagaagaatttagttaaaataaaaattaaattgtatgaagatgaggaatttgtaatattagaaattagtgataatggttcaggagttccagatgaagatctttccaagttatttctaagtttttatagaggagatgtttcacgaacaaagcctaatgaaggaagtggacttggattagctatagcaaaacatataatagaagcgcatgatggggagattaaagcttttaataatgatggacttacaataagaataacattacctaaaagataattgtaaaacggagatatattataaggtagggaggatagtcaatgaaaaagatattgataatagaagatgacgaaagtatagctgaattagaaagagattatctggaaataactggatttaaaacggaaattgctcaagatggatataaaggactagatcttgcgctaaatgaagaatttgatttgatccttttagatgttatgctgccgggaaaggatggatttaaagtttgtcaagaaataagagctgtcaaagaaatacctattttgatggtaacggctaaaaaggaagatatctataaaatacaaggtcttggcataggtgctgatgactacattgtaaagccatttagtccaagcgagcttgtagcaagagtaaatgcacatatttctagatatgaacgtctcacaactattgaaaaaaatagcgataatgaaaaaagttcaataattattggacgcattaaaattttacttaaagcaagaagagtttatataggggaaaatgaagttaaatttgctaacaaggaatttgaacttttaatgttcttagcttcaaaccccaatatcgtattttcaaaagatacattgctagacaggatatggggagaagaatctttaggcgatagttctactgtaactgtacatattaatagaataagggagaaaatcgagttagatagcagtaatcctgagtatattgaaactgtgtggggagctggatatagatttaatttataaatttataattatttgatattgaacaaaaatatgtttattttaataatggtttgatttttactataaattttaaaaatcatatgggaaaataacaggattatgaaatgttggctaaaggtgcaagtaacttttgtaaggaaatgaaaaagttacttgcacctttagctttaatttataatattaaatttaacatgaatttaacatttgtttatattctgtttagatatgtgtaatagagatgttacaatcctttattataattagaaaatgaatttagagtagaatagtattactaaatgacaaattgaggaggaaacaagattgagaagaacatttataagttttttaattggaactttagtggtttctagtagtatatcaatgattaatataccaagtgcatatgctgacgctactgataatagtacaattaacgaagtgtctgatagtgggacgattaaagtatcattagaaaacatacgagaaatcatgactgaaaataatttagatattaagattctggataataagcttaaaatcgctcaagagacgtatgatgatgataagtctgcctacacttcaaaaaccgagcctaagcaagaagattataaagacgataatggaaattatgatgatgcagcttataagaaagctctggatgcctacaaatcagctaaatccgattatgaaaaatcaaaagatgacttaaaaacagctagagataattatgataaaggtgttgaagataaggtttatgcagctcaacaagcatacatagcttatttgtatgatttatcgaagaatacaataacagaagatacacaagagcaaaatgaaaaaaaggaacagatatacaaaattcaatatgatagtggattcatatcaaaaaataaatatactgagttattacaagctaatacatcagctaatgattcaaaatctacaaaggatacagctgaacttgatagagttaaactatgtaatactttaggtattagtcctgaggaaaaagtgatattcaacacagatataactaaagactttcaggttatagctaagataaattatgaagatgacttgaaacatatgcttgacaataacttagaaataaaattgcaaaacgatactattgatgacttaaaagatcaagaagatgattacgatgacaaagatcaagatgatatttatgattataaacttgaaaatgaaaacactcaattaacacaacttattaataattcagaaacagatttcaagaaacaatataatgatttaatgacttcttacaattcaataaaaagcagttatgatgtgataaaccagaaacaaaaagaatatgaaattgagcaaacaaaatatgattatggatttgtttcaaaaaatgatgtcgatgctgcgaaattgactttagatagcgagaatgcagattttataaataaaagaaatcaatgctatttatcttatttaaagtacattgaaatgaaagagggttactaaaattgaagtttttatttaataaaaaaactttagctaataaagaaattatagaaacaactgaagcaagcaagaaaaaatttttgactaaaaagaaagttataagtttagttgcgatattagttgttttagcaataggaggaggtatttataaggttaaatttgctaaaacgaaagtaacacaaagcagcgttaagtatacaactcttaagaaaacaaatattgctacaacaattagttcatcaggcgctataaagagtggagattcaaccaatatatattcaaatttagaatataatgttgcatcaattaatgtttcagttggagatgtagtaaaaaaaggggatgtgcttgcaacaatagatacatcaacgcttcaagaacaacttgctgaggcagaacaaactctaaatgcaaatgagcaaaaaaatcagttatcattaacaagtgcaaaacaaaaatacgaaaatttgcaatatttacatgatagtaatttacaaactgatataataaatgctgaaaaagctgttgatagtgcaaaactcgatatggaagataagagtaaagtttatgaatatgataaggtcatgtttcaaaatggcgaaatttctcagcaagatctaaatacagcaaaaacaaattatgaaaattctaaaggagtttacgataagtcaacagttgcattagaagcagcaaaagttaattctgatcaagcattatctgaagcaaaaacagcttatgaatctgctcaggcagcggctaatgataagagtaataggcttgcatatgaagacaagaagaagaaattacaagatgctcaagttgtagcgactgtagatgggacagtaactaatgtaaatgctgtagtaggtatacaagcatctggagcattattcgtaattcaagatttagggaatttaattgttaatgcaagtgttgatgaaacagatgttgcaaaagtgaaagtgggacaaaaagctcaaataacaacggatgcatcaggttctgatattattgatgcacaagttgtgagtgttgaaccagtttctagtactgctagtgcaagcacaagtacaactagcactagcaatggtaagactagcactagcaatagttctaccagcaacactacgagtagtgatgtatcattcacagttaaggtacagttaacaggtaaaaatgataaggtgaaagtaggtatgaattcagttgtaaatattatcacaaatgaaaaagatgatatttattcagtaccatatggagcggtaattaataacaatggacaaaacgaggtttatgcagcagttgaacaaggtgggaaatatatagttaaggagattccagtaactaaaggtatagaatcaaatgcaaatgttgaaattgatggttctgatctatcagatggaatgattatacttaatgagccagcaaattataaagttggtgatgcagtagaaataaattctagaaaagcaaagtagggggtgagtgtctttgagtaaaaatataatagaaatgaaagacattacaaaaagcttctatattggaactccgaatcaattaaatattttaaaaggaattgatattagtgtaaaagaaggagaattcgtatcaatagttggttcatctggatctggaaaaagtacattaatgaatattataggagcacttgatagagcaacttctggaaactatattttagatggtacaaatattaacgagatatctgataatggtttatctgaagtaagaaataaacaaataggttttgtatttcagacatataatctaattccaagaagttcagctttgaagaatgtggaattgccaatgctttattatggaatgagtaaaaaagatagaagaatacgtgcagaagaacttttagaccttgttggaatgaaagatagaatgtctcatcaacccaatgaactgtcaggaggacaaaagcagagagtggctattgctagagcgctagctaatgatccaagtataatacttgcggatgagcctacaggtgcacttgattcaacgactggaagattggttatggatttgtttcataaagttcatgaacaggaaggcaaaaccattgtatttataacccataatagcgaacttgcagaggaaacagaaagaattataactttgaaggatggaaatataatatctgaaaaaaagaatgatatgtactacagaagatttccggaagaggacaacgtatgtttataaaagaaaatataatgcttgcagttgcagggcttaaatccaataaaatgagagcgttacttacaatgcttggaataataatagggatagcgtcagtaattggtgttgtttcagtaggaaatgcaatgacctcttctttaacaagttcaatgtcatcgatgggtgcaaccaacattacagttaatgtacaagaaaaaagtagtatgacaagtacattaaattcgccgaactctaatagttcaagttcaaaaggcacaaataattctaattcaaaaaattcagggtcgaaaaattctaatagttcaaacgcaaaaaactcaaatggtaattcacaaaataatagtggaggcgcaaagtctggcggtagctcaccacaaggtggaggtggagtgcctggtgcaggcgctatgagagcatcaagtggaggaggaatgcctccaggaggttcaggaagacaaggaaaatcaagtagcactgcaaaagatattgaccttatgacaatggaacagataaatgatttacaagaaaattttaacgacgagataagttctttaagtgtatcggaaaatggtagttcaggcaaagttaagaatgattcaacatatgctaatataggtacagtgggtacaaatgttgggtataaagatgttaagaatttggaaatagccgaaggcaggtacctttcacaaaatgatattgatggagcaaaagatgttgcagtagtttcagataaattagcatcaaagatatttggaacaaatgtagatcccataaaccaggatataaaggtctacacatcaaatgcaatttatacctacacaatagttggagtttataaatataaagcttcaggaggaaatagaacaacatctgatgaaaatttaactactgacttatatattccggttactgtaacaaagaagacagcaactaataaaaattatcagacatttcagataaaagcaaaagatgaagtaaatgttcaatcatttactaatgaattatcagactacttatctaagctttatgcaaaaaatgcaaagtttgaagctcaagcaagcaatatggaaagtatgcttgaatcaatgacatcaatgatgactacagttgcagtggctatatctgctattgcaggaatttcgctagtggttggtggaattggagttatgaatataatgttggtatctgttacagaaagaacaagagaaataggaactagaaaagcacttggagctaaaagcagtcatataaagatgcaatttatagttgaatcaattataatatgctcgattggtggtgttttaggaatattacttggtttaggtgcaggagcaattggttcaaaagccatgggatatgcaactacggtatcaccattggttattttaataagtttttcattttcaatgtttattggagtattctttggatattatccggcaaagaaagcagcggaactagatcctatagaagcacttagatacgaatagaatagactttaaaataatttttaatgccatggagtattctgtattattactccatggcattattatattgctattaaacaaaaatttcataaattccaaaagcgattaatacacttccagaaataacatttgaatatctaatcaaatgttttgaaaaattgatatttcgattaaaatagcctatatatacaaataagatagaaataataaaatttaaaaatacacttatactaagattaacacctgttatacttgcagcaaaatttgtacaaatattgtttagagatattgcagtagaaagagctaaacattcttttatacttatattatgagatttatctaaatttagaatataagagtcatccaatatacttttatatttaaaagaactttcgtaataaaaggaagtgtcgtaaccaagacgttttttttctaagcgaatatattcaactataaaagaaataccaatataacttaaaagaatagcaccaaatgcattactgaccttaggatctattaatggcagaattaatttaccaatatacatagaaacaaatgtaccaacagaagttactattgcaagtaaaattgtatttggcttagataaatgtattttcttaattccataagataaaaaaactgataatgttactatatttgttgaaatagctaataaaagaggtgatataaaaatcatatggaactcctaaaaattattttagtataatatattcattttatttaaaaaaagattgtaatatgataaatttataagatatttaagatatttttggtatttgattgaaaaaagaatgaaatatttaaatattgaaagcagtgttgtaaaattcaccaatattaaagagagctattaattatgtaaagtaataacataattaatagctctctttattttaattagtctggttactccattttttaaaattaaaataattaactagtatgacaataaaaagcataacagcaaatacatataatgaatactttatactaattcctaaaaatgtataaagtagaattattggtgtatctgcaaaaaatattgttaaagtatatttaataaagctaatttcagctaatacagagaagaaacaaataatgtctgtgggtacaactggagaagatacccctaaagctagaagctgcacattattttttttaatcatgttgtatatttttggatatttatttactattttattttggtaactcattccaaacgtaagtcttgcaaagaaaaataatagaatttcacttaataaattcgctgttgcagttaaaataaatgcttcatatggattaaataatattccaccaataattataaaaattgtacaaggaattagtgtgaaaattcttagcgatgcaattatgaaaaataaaattgcactgaattttccatatgtatttaaaaaaaatattatcttattaactccatcactatataattgatatttaaaaaaaacaaataagattgatatccaaaatataataacaatacctttgaataacttactcattaaatttaccactccttttatactaaacttaaataaagcaaaaaagtttttactagcaatatttctaccttactataaactattttaccaataaattataaggaaatgttaaaattttggaaatctttcgtttattttaagaattattaataacaataaagtaatagaagatattttaaacttaaggtataatatagtaaaaacataacatactagggggcagttgtatgagtaaatattggaatgataaagttagaaaaatagagccttatgtgccgggggagcagcctaaggatcaaaagtacataaaattgaatacaaacgaaaatccttatccaccatcagataaagttttagaagccatgaggaacgaggttaatggtgatttgaaactttatccagatccgacatgtaatgagttaataagtgaaatagctaattattataggctagatgataatgaaatatttataggaaatggttcggatgaggttttggcgttttcatttatggcttttttttcaaagaacaaaaaaatattatttccagatataagttacacgttctataaggtttacgctgaactttttgatttaaattatgaattaataaaattagatgataattttgatataccattggaagaattaaaacaaacaaatggtggagtaataataccaaatcctaatgctccaacaggaaaatatataaatacagaaagattaaaaagtttgattgaagctaataaagatagcgtagttattattgatgaagcgtatatagattttggcggccagtcgatggttaaatatataaatgaatatgataatcttttagtaattcaaacattatcaaaatcacgttcattagctggattaagagttggatttgcactaggtcataaagatttgatagagggattaaacagaattaaaaatagtataaattcttataccatagacagagtggctttagctggagctaaagtagctattcaagatagtaaatattttgaggaaataactaagaaaataataaaaacaagagaaaaagtagttaaggaattagaaaatttaaattttagagttttaaaatcagaatcaaattttgtttttgctagtcataacaatgcttctggaaagtatctttacgagaatttaaagaatcaaggaatactagtaagatattttgataaagaaagaatagataattttttgagaataacaataggaactgatgaagaaatggatattttgattgaaaaattaagattaattttgagtaataattagaaagaattatgataaaagtataggagagttagatgcaatgtgctaaataggattacttttggaaatcatatttagtgaattgtatctaattttacttattagagaatgttattagtcatatagaataagagttaagaatatggatataatggaatttttgtctgaatttatgactagacatttctgaaattaatagagagattttaacatttgaaggaagggttgattttatggaattatgtgttaataaagaattcgttttagatgttgcaaaggagatattagaatttgatagtccaactggcttctgctttgagataattgataaaataagagatatagtgaaagaactaggatatagttttgaaactactaataaaggttgtggaataataactataaaaggcaagtcagatgaaaaaatattaggattatctgcccatgtagatacattaggagcaatggtcagatcaataacttcagatgggaagataaagttcactttacttggaggaccaattgttccaactttagatagtgaatattgcacaatacgaacaagggaaggaaagaaatatacagggacattcttaagcacaagccctgcagctcatgtttttgaggatagctcaagtaaaacaagagatccgaaaaatatggaaataagaattgatgaagaggttcattcaaaaagtgatgttcaaaagctggggatttgtgtaggcgattttatatttattgatcctaaaacaacaattactgagagtgggtttataaagtcaagatttattgatgataaaggtagtgtttcttgcttaatggggttattggagctatttagtagagaaaaaatcgttcctaaatatactaccaagatattaatttcaacttatgaagaagttggacatggagcatcatatataccaagcgatatagttgagatgatagcagtagatatgggatgtattggggatgatttaacttgtagtgaatatgatgtatcaatatgtgccaaagattcaggagggccatatgattataacatggtaacaaaactcattaatcttgcaaaggataatgagcttaaatacgctgtagatatctatccaatgtatggttcggacgtaggagccgctttgagaggtggaaatgatatacgtggagcattgataggacctggggttcacgcatctcatggcatggaaaggactcattatagtgcctttgaaaacactattaaattattatatttgtacttaactaattaaaaaaataatcataacttattagtagaattgcaaaattaaatgtatgttatatataaagtggtttttgaggtaaaaggtaagtaatatagatacatttaagtagccattttaataacttctgcataattttattatgcagaaggagaggatggattatggatatagagaatttaaaaagggaatgtgtaaaagataaaagtgagaaagaatatattgaaaatgtaaagagaaccgcaatggtattattaaaacaattaatagacctcgataaagagatatgggaagaatgcagtaatatatgtcatatatatagagcaaatattaaaaaagaattttgtaattattttatcaaaaatggctttgaaattagacaaggaaccgagataattgcaaaatatgaatgtttagaaataaaattattaaaattggcagaggatagtaagtatgaggctaaatatatccttacaattgtaggggataaggaattttatattaaattaaggccttctaataaatgtaaaaagataatttcatggaactatccattatttaataacgatgaggccaatataagtagagaaattggaaataaggctatagctgattgtaatgatttagaaaaattaaaaaaagcaagcgagttttttaaaaagaaaatagaagaatttaatgagatattaagtgacattaattcatttagatatatttatacagaatacgaaaaagataaaactactgatgataatgaagttgaattcgatacatttgaggaattgtttagatcattatagatatataactataaatattgttgaaataaaattataaagaataagtggataaaatataaggtatataattatctaatattatctttactctattataggattttagagattaaaataattttaatggacaatagacaggtttgatatattaatgtatctaattgcataaggagaataattataataaattttaaggcgattttaatttggaggtatattatgaaagcatttatatttgacatggatggagtaattattgatagtgaaccaattcattttgaggtggatatgaaaactataagagaattaggttgtaatatttcggaaaaagaattggaaaaatacgtaggatcaacaaatgaatatatgtatacggatataaaggaaaaatacaatataaaaaaatcattgcaagaaataatagattataaagtagaattgaccaaaatgaagattattgaatctcatttagagccaatagatggaatcaaagaattgttaatagaattaaagaatagaaatattcctgctgcaatagcatcatcatcacctaaagatttaattgatatagttgtatcaaagtttaaattacaagaatactttaaatatattataagcggagaagaagttgaaagaggaaaaccatcaccagatatttatattgaaacatcaaaaaaattgggaatatcaccaaaagaatgtgtcgttattgaagattctaggaatggagtatttgctgcaaaagatgctaaaatgaattgtataggatttaaaaatattaactctggaaatcaagatttatctaaagcagatataattgttaaatcaattcgagatatagatttaagtaatattctagaaaaccatataatttaaaattatatagaataaatgaaaaaagcagatattattaaatttcctaaaattgatttttttaaaattatttgagattatacgtctaaaatggtataatttatatgaaaaaaatcaagggagacgattagatgcgacgagataaagtaaaaaaactagcaataatagcaatatttttatgtattagtagcataccagtagtaacttatgcaaaagattcaagaataaatggagaaagtatcgaacaaagtaatgtcgtaattaataataactggcttacagaagaggttgctaagcagttaagcaaaaaagttggaaatcttacagagcaggacttcttgaatatcaagaaaattgatttaagatatgaaaatattgatagtaatatacctgaagaaattaaattactaaaaaatttagaatctttaaatttaaactactgtaaaataagtggacaagttccggaatatctaggggatttgcctaagctaacttatttagatttaggagataataaaattgaagaattgccagataatattatgcaaaaagccattaatggaaaatatagttattgtgatattgaagggaataagtttaatttaagtgaaggatggtatttcttaaaaggaaaatggtgctacctagatgctcatggaaagagggtcaatggtactcagacaatagatggaaagcagcatgaatttaatgaagatgggagcgtaaaagaaggttgggaaagtgataaggataagaattggtactattatgacagaatgaacggtgtaataaagaatgactggaaacagatatctggaatttggtactattttgataaagatggaaaaatggaaaaaggattgcagacaataaagggtgttaaatactttttcaatgataatggagcaatggcaactggatgggtgaagatagataatagctattattatttttcaggatcaggagcaatgcaatatggatggttaactttaaatgataagatttactatctggatggtacgtcaggcataatggcatcaggggatacggttataaacggtaaaaaatatagattttccagtgatggttcattaattaagaatgtatggctagataattatacatacgttaatcctagcggtgaaacagtgaatacttactctaatttttcgcattcaagtacaaactatcagctatttaagtatatgactaatgtgaataatcaattaagcgtagatagtactgctgttgcattacatgacggcattactagtaataactgtgtgtattttacatctgaagcgttaagaagaataggtgttaacataccaacttcaacagcaaatacatatcagttagagaacatattaaagaatatgggatttgtctatagttatgatttctctcaaattaaaccaggagatattgtatttacaaataattatactcatgtttacatttttatggggtgggacaaagatggatatgcttatattgtagataatcaaaggacaagctttgaaaatttagtacttcataaaaggcttattcttcaagatactgcaacaacagatagggcgactcatttcttctactatccatattaattatgctgttaatataaataaaaaaatatatatattgcaaaaataattctaaaaatattacaggaattatagctgtaattgtgaaatgtgaattgtaaattgcaacatatatatgtgaatttttcttagatttttataaatgctcgagatatatttatagatataagttaaagtatatatctaaataaaataggaatataacatatttaattatttcacttagcttaggctatgacgaggatctttataattaataactttttattaattataaagatccttttgttatgaaaaaatgtaaataaattttattcatatatattgagcaattatagtataaataaaaatatgaatataatgtatggttgcaatggaaggagaaaagtttgatgaaagttcaagttgatatattttcaggttttttaggtgctggaaagacaatgttaatcaaaaagttattgtcagaaaaggtttatgataataatacagttattattgaaaatgagttcggagaagttggaatagacggagacatattaaaagaaagtaatattgaaattaaggaaataaattctggatgcatttgttgtcaggtatctggaaactttggagaagctgttttagaagttataagtaaatataatccgaacaatataataatcgaaccttcaggagtagcaaaattaagcgaaatattaaatattcttcaggaaaagaaatttcagcatgaactcgaaattagaaatatttttactttaatcgatattagaaattatgatatatatttgaaaaatttcaaagaattttatgagaatcaaataaaaagagcaaaaactatagttttaagcagaagtcaacttgtagataacaaaaagattgatgcaactatagattctataagaaagttaaatttgaaagctaaaataatatataaaccatgggatttattaaaaggaaatgattttcttagtacaaatgtaataaatgaaaaaagaaaaatttttgctgcaaattctagcattagcgctaacacaagtaagcagatgagaagagaagtaaatcatagtgcaaatgaaatttttgaaagttatcctatagaccttgaagaaaatataagtatgcttgaaatccaaaaaaaattcgaatttatttcaactaatgataagttcggaagaataataagagctaaaggtgtttttaaggcaaacgatggagagtattatcaatttgattatgtacctaatgaatttaaaagtagaaaaatcagatggtcaaataagaaagtggtttcaataattggtagtgagttaaataaaaaggaattagaaaggctatttattaggcaaatataaaaaaatgattattagaactttgtagagaggtggtggaattatgaaaatacatattgagattgtgactggttttttaggatctggaaaaacgtcatttataaattcacttttaaaagaaagtttagttgatggggaaaaagtattggtctttcaattagaacaaggagaaaaaaaaattgtatattctaataacataagtaattttgtaaggatacaggatgttttagatattaaagatcttaaagaaaaaatgatatattcaataaagaaatataaacctaacagaataataattgaatataatggaacttctgatttaaaagaattattcgatatattgaatgaaagaatttatagagaatgtagtaagattactactgtattcttcgtcgcagatggcaagacattaaaacaatatattgacaatatgggaggcttcataataccttttatacaaaacgccaatatgattgttattaataatatagattattgcaaaaaagaaattttaaatgaaggttttaaaaaagttaagaacataaatcctaaagcatttattttacgagttagtaataagtatattttaaattctacacttagggaagcaagggtattggacaatggttatttaaaaaagataaaaattaaaatgataaactacaaaaaagatactaacataaaatatgagggaaatgaggaaaatgtatgaatctttataagaagaaggttaaagctttctttattataagtgtagtaatactatcaatatatatatataataaatatccaactcttatatatattgaagttataggagattttgcaagtatatttacaagtataattcttgaggcaatgccatttatcataataggatccctcatatctgctataattcaaacatgtatatcagaaaggattattgcgaagataatacctaaagcaaatattttaggatatctaggagctgctttaataggacttatttttccggtttgtgagtgtgcgattgttcctataacaagaaggcttataaagaaaggtgtacctgttgggtttggagtaacatttatgcttgctgtacctataattaaccctgttgtaataatgtcaacttactatgcattttacgataaaaaaattatggtgcttcttagaatagttggagggtttatagctgcaattttaattgggatgatagtaaattcgcttgaaaaagataagaaaggtttagtaatagattttatagataatgatagctattgtaactgtggatgtaattcatatgtggaaaatcaaaataaattaagagcaataattgaacatacaaatagagagttcttggatataatgggatacttgatacttgggacatttatatctagcgtatttcaagtggcggtatctcatggagaaataaattttatttctaataataagattttaggaatagttgtaatgatgttgcttggattctttttatctctttgttcagaagtagatgcattcgtaggaaaaagttttttaactaactactcacttagtggggttacagcatttttaattttaggtccaatgcttgatttaaagaatcttattatgattattggagcctttaaaaaaagttttgtacttaaattaagtataagtacaataggtgttgtatttgtaatctcctttttattcatgatgtgcggaatataaagatgcactctaatgatagtaatttaaatataaaaaggagctgaaaaataagtgaaaagatttaattttgatgaatttttatggtttattgttcttatcttactagatttgtctgtaatatatttaatatctactggaagtataggtttttatataggtagtaatatgattaaatatttttatattactatagtaatgataagtataattactgtttttcaaataaaaaatatatttacacctaaaggcagcatgaatattaaaataaaattatttccaataatactagccttaataataggcttcatatctattaataagcaacaaacatttaaacattcagagctgaatttagaaattttagaaaacaaaacaagtgttattgatagaaagtcattatatgaacatgaatttgagtataactttaaaaagagcaacacaggaaacaatgaagaaactataagaattgacgaacataatcctacaatgcttgatgatatacgaataaatccagaaaaatatatagggaaaaaattagagatacatggatttgtatgcaaagaaaattatttaaataaaaatcaaataattataggaaggattataatgacatgctgtgctgctgattcaaaaattgttggaatagttggagattatgataaatcgtaccaactaaaagagaatgataagattaaggttataggggaagtagggagcacagtgattaaagatgaaagcgatgtagagcatagaataccatctataaaaatagaaaaattagagatagaaaattaaagttaaacgtatattcatgaaaatcactaataaaagtaatttattagataaaaaaagcatgaatatacgtttaatatgatttgatttaaattttaatccagtagtattttatatacaaaattcacaaccgcttatccttatttagaaggatctgataaaataattgttacataagaaattttaccatttggttcattattagaaactacattgatcttaaatgtatcaaatttattattccattcaagtccagctggagatattgtagaatccgaatcatctgcgtttattcctactaattttaagatgttaattccgtcagctggatatttcatttctgacttaggaattatcttaatttcattacactttgaatctttatattttatctcgaaactataattatctttttcataggtagctttatcgtcttcttcgctaatagcttttcctaaaagtttctcgatttcactcttttctttatctttgaaatcagtcaaagaagcaatttgtttaacttccacagttggtttgttattttcgccaactattttagtattactttgaggggattgttcagttgtagatgttgtggaagactgctccgttgtatttccattatccaaatttgcaggatctttagtttttccacaagatattaatgcagttgaactaactgctgcaattaacaatagactaatgattttctttttcataaaaattttcctccaacattatgtgcatattttagtgagtttttttgatataagttctaaataacatagttcattttctataaatatctgataagtttaagataaacatttatgaattgaacttattagaacatatacatcattaccgattataacactgattaatttaggtaattgtttacttaagaaaactttaataaaataataatttattattaactattagcgttaatagaattagtggaagaaaattataaattaaagtgaaggcacattaatgctaactaattcttatatagagaatgattagattagatataaaagagtgtgcagaggtttaagtttattataaaaataaaaggatactcattttagtcattcatgtgaaaaaataagtatccataatactaatttgcttaagctttattaagtgttataataaaattttatttgttaaatttgctactataagatttatttttttgctcatattgctttgtactagagttataattagcatcttctaaaactccgccaaaaactttcttttctttaaattgtatattaaattctctctcgtatttttttattatattaagctgttgaacagttaaaatacatatagaagtgccgtgagcgtttcctctagcagttcttccggatctatgtagatattcgtttaatttcaatggcaaatccaaatggaaaacatgagttatatcagcaacatcaagaccacgagcagtgacatctgaagagactaatatttttattttacctgttctaaaactttcaattgcaagttttctatcttccttggaaatctttccggtcatagcaaaacaatctttactatgataattaagttttgctgttgttatttcaatgtcatcattgttattaacaaagataattgctttttctggtttcacagctacaagaatttttcttaaagtttcaaatttatcacgtcgctcacataagataaacatatgctcaatattaggattcattaatggtttactttcactttttattattattggatccttcattaaagactttgcagtttccaatgtttcaggtcttatagaagctgaaaataacataagctgcctatctctcattgttgatttaataatatctttagtaatattagctctcttaggatctaatagattatctccttcatcaattactattgtttttatagtatgagcagttatttttttctttcgaattagatctaaaattctacctgttgaaccaacaattatgtgaggttttatttctttgagtttttttatttgattatttatattaacatcaccaattatagatagtgaagttataggaaatgatgagttttcagcaagaagcttaatctgatcttctatttgtttagcaagttcatgtgttggggccaatattattccttgcatttctctctttgatgtatctattttatgaaaaagaggcaatagataagccaatgtcttaccacttccagtaaaggcttcaccaattatatctttaccctcaagagcaggtaaaatagaatcggcctgaattgaagttggtatattaatgttttgtttttgtagtccttctattatacttgaatttaaatttaaatcactaaatgagttaatcattaatttctccttttatcgttgaataatttttctagatatattgctaattaattatatccttattatgtgcatttttctagttaaagttacataattcaagtcatatattatctaatgtatgaggaacctatatttcgcataagagatgcctctgaaattaaaaattgaatcttaagcataaattgtattgcaaaaatgaaaaataaaccaataaatagtgtttgaaaagtagataagaatggtataataagaaagatttatataatttatgattaatataatttaataagataactgaggtgaaaatttaatatatgaacaataaattcactaaatttaacataagtgatgaaatattaaagtcaatcgaggggcttgggtataaaactccatcaaaggttcaagaaaaagttataccagaaatacttatgaataaagatatcatagttaaatcacaaacaggaagtggaaagacagcggcttttgggattcctttatgtgaaaaagtagattggaatgaaaatattccacaaattttaatattgacaccgactagagaacttgctgttcaagtaagcgaagatataactaatataggaaggtttaaaagaataaaagctgtttcagtctttggtaaagagcctatctctgaacaggagagaaaattgaggcaaaagacgcacgtagtagttggaactccgggaagaattatagatcacttggatagaggtacgcttagtgtagataaaattagatattttgttatagatgaagctgatgaaatgcttaatatgggatttatagggcaagttgaaggaataattagaagacttccaaagaaaaaagttactatgttattttcagcaacaataccagaggaaataaaagtattatgcgataaatatatgaataaacctatagatataagtattaaaaatcaagaaatcactaacgaaaatatagaacatagtttatattatattgactatgaagaaaaaatagaaaaactaaatgatattttaataatagagaaacctgagacagctgttatatttgcgaaaactaaagataatgtagacacagtttttcaatggttaaaatctaaggggtattctgtaaataaaatacatggaggaatgcttcaaaatgaaagattaagcattatggatagatttagagcaggtgattttagaatacttgtatcaacagacctagcttcaagaggaattgatgttaagggaattactcatgtaataaattatgatctcccggtagagaaggaagcatatgtacatagaatagggagaacaggaagagctggtgagaaaggaaaggcaataagcttctgcgttaaggggaaggataagcttttgaacgaaattgaagagtttattgggtttgaaattcctgtctataatttacctgataaaaaggtaattgaaaaagaaagagaagagggcattaaaacacttaaaagtaaaccgaaagtgaaagagcaaaggtcaaaagatataaatagcaacataacaaagatttatttgaatggaggcaaaaaaaagaaaattcgccctggagacatagttggtgctatttgtaaaatagaaggtattaagtctgaagacattggaataatagatgtccaggattcagtatcatatgttgatatattaaatggaaaaggaaaaagagttatagaagagttaaaaaatataactataaaaggtaaaatcattaaagctgaaaaagcaaaaaaataagtatgttaatataaaattttaaaggatgttaacataaataatattaagtggtattatagatagtgaatatgaaatcttattaaaaataggaaataaaagtaaattaattactagtcttttgcattataaaattataaatgccatattacttaaaggaagataagcttaagatgttaagattttagcagagaatagaatatatgtgagcatttaaattggtttaggtgtattatatatatagctgaatatttgatggcaaaaaactaaaatattaataaataataatgtattataaagaggtgttataaaaacaatgatcttagatagaaatgaaaaatgttggtgtggcagtggtttgaaatataaaaaatgtcatttagaatttgatgaaaaaattgaaagttttaaaagaaaaggccatatagtaccaccaagaaatattataaaaagtccaaaagatatagaaggaatcaaaagaagtgctaagattaatgatggggttttagacttagttgcaagtaaaattaaagcaggaatgagcactgctgatatagataaattagtatatgattatactatagaacatggggcgattccagcaccattgaattttgaaggtttcccaaagagcgtatgtacatcgataaataatgaagtatgccatggaatcccagatgaaaatattataatcaaagatggagatattataaatgtagatgtttctacgattttggatggatattattcggatgcatctagaatgtttatgattggcaatgttagtgaagaagccaaaagattagtagaagtagccagagaatgtatgataaaaggaattgaagccataaaaccttggggcttcttaggagatataggtgcagcctgtcaggaacatgctcataaaaatggatatacaatagtaagagcattaggtggacatggaataggtaatgaatttcatgaagatccatttgttcctcatataggggagaaaggaacaggaatgttgcttgttcctggaatgattcttaccgtagaaccaatggttaatcaaggaacttatgacgtttttgttgatgaagaaaatgaatggactatttatacagccgatgataaattatcagctcagtgggaacatacagtgttaataactgagactggaatagaaattttagctaagtaatatatagggtagttaaaagtggttttaaatcaattttgactaccttgtttaatggaagtattaatctaaggagtattattaaatggataatgtagctttaaattatttggagaaatattatggatataagtcatttagaaaagggcaagaagacataataagcaaaataataaatggagaagatgtacttgctataatgccaactggaggaggaaagtcaatttgttatcagataccagcactgatgctagaaggaataacaatagtaatttcacctctaatatctctaatgaaagatcaagtagatacgctaaaggatatggggataaaaggcgctttaataaatagcacactgagtgctatagaagaaaaagaagtaataaacaatctggaaaatagtgaaataaagattctttatatagcccctgaaagattagaatcttttgaatttttgagtgttatttccaaatgtaatatttcccaaatagctatagatgaagctcattgtatttctcaatggggacatgactttaggggaagttatagaaaaatatcacattttataagtttacttcaaaaaaggcctataataacagcatttactgcaactgcatcacaggaagtgagagaagatataataaatcttcttaaattgaataatcctaaagtctttataacaggttttgatagagaaaacttatctataagcgtgattaaaagtggtaacaaaaaggaatatttatataaatatatagaaaacaataaagaagtttcaggaattatatatgctgcaactaggaaagaagtcaataatttatatgaatctttgcaagcgaaagggtataatgtgacttgctatcatgcgggattatctgaaagcactagaaaagaaaatcaagaaaattttatatatgatagagctgatattatgatagcgaccaatgcttttggaatggggatagacaaacctaatataagatatgttgtacactataatatgccaagaaatattgaaagttactatcaagagattggaagagcaggaagagatggagaaaagagcgaatgcgtattattattttcgcctcaagatgttcaggtacaaaagtatttaatagaaaactcaatagaagatgtagaaagaaagaacaatcaatatagaaagctccaacaaatgatggattttgtatatagcaattattgttatagaaaatacgtcttggagtattttggagaaacatataatgggcaatgtgataattgcagtaattgtttgagtgaaggagagtttgttgataagacaatagaagcgcaaaaagttctttcatgtatatacaggatgaaagttaaatttggaattggaatgcttgtagatgtacttagaggatctaaaaataaaaaagttattcaatttcattttaacgagctttctacttatggattaatgaaagaatattcagcagaagatctcaaaaactttattaatacattgatctctcatggatatattaatgtggttgaaggtacatatccagtgttgagtttaaatgatagatcaagaagagtattaacgtctcaagaaaaagttcaattaaaagagtttagagtagaaaagaaagctagtgaagacaatgaactttttgagattcttagaaatttaagacaagaactggcaaaggaaaacaatgttccaccatatataatattcggcgatgttacattaaaagaaatggctgtaaattatccaatatcaaaatatgaaatgcttaaagtttctggagttggagaagttaaatataataaatacggaaaagtatttgaagatgtaatacgtaattttgtagaagaacatgaaattgtgatacctgatcatgatgaaggtttgttaggtgaacaaaagagtataaataaagatgaagaatctagattagaagttaaaacagacttagaattatacgagagattagacaatgcaagaaaagaattcgctaaaaaagaaagagcattaccacaagcaatactgacaatgaatactctaaaggaaataagcggaagatacccaatttctttagatgaattaaaagatataacaggcatgggacccaagaaaataagttcgtatggagaaaagataataaatatagtaaccgaatatttgtcagaaaatgatagaaaagtagaatggattgaaagaaaaagaagaaaggttataattgatggagagactagagagaatgatcaaatctcaatagatatgcttaagcagaatataaatatacatgaagtatctcaaaaattagaggtctcaatttcaactatcctagggtatgtaacagagtatataaaagagtttggagaaaatatattccatgtaaatttagaagaattttataataaagaagatgaaaagctaataatagatgtatgccaagagcatggatatgataagataaatgtactaaaaaaagaactaccttcacatataaaatatgaaagcataagagctgtaattttaaaaaagtactatttgtagccaactaataaaatctattaagttattttgaaccaaattaagtgcatctaagaatattactaatttttattaaatatatttaatagtggaatagaagatagagtaaagaggtgtaattaaattggatccatacgaggttttaggtgttgaaaaaacagcttctgaagaagaaataaaaaataaattcaaagatattttggaagaatatacacaaaatcaaaatgagaccaccaaacaaaaagttttagctcttagtgcggcatatgagctcattattaatggtaatctatataaagaaattcgtgatttagtcgataataaaaacttttctgaagctgaagcaaaattgaacttaataaataatgcgaattcagcagaatggaattatcttcaaggttttatatctgttcaaaagggatggtttgacagtgggcttaattacttgaaaaaagctgtagaattagatcctaataaccatgaatatttggacagcttaaacaaattgcagtcaagagtaattgattatatgaaaaaatatacaaataaaaatgttaaacctaattctaataatatgaatgcttgcggtggagataataatagtagtggtaacgggggaatgtgttagtatatatgttgtaattaaatttcaagattctactcttaattgagcgctttgcttactagagttttaaatgtaaatttattataaaacatatatatatctatattaggattttaaatttaacatatatagataaagtttataatttgtgttgaaattttgaaacatttatgttattctaaatgagcagttggtacgtaaagtgctaatgtggagcttagagtgtccttcgccggtctctaagctcctttttgttttagtaaaatatgctgtaattaaattaaaaaattaaatttatgttttaataatataaatatgtgaatgatatcttttgttaaattaataaaaaaagtattagaaattacattaatagtagaaaaaaagttctataaatatatttttcaaccaacaaagttaaaaatatatttaatacatgatataatagtaagtatcagtttagattttacgaaagcatttttatgaaatgttaaattaagcctagaaattaaagttttacatttgtttaataaaaagtaccaaaacgtatatttttttttgtatataataatgaccggagaagggagcgtatgtcatgctcgaatgtgttttaatagatttaaatgttgataagaacacaagtataaatgaacttattgaaaatcatatgccttttataataaaaagtatttcagatgtgacaggtcgctatgtatcttgcgaaaatgatgaagaacttagtgttggattacttggttttcatgaggcaattgaaagatatgataatgaaaagggacattttttatcttttgcaaaattggtaattggaagtagaataaagaattacttaaaaggtgaaaataagcataatcattcatctttggacgaattagtggacaaaggtttggattttagagatgaatattttgagcctaaggaagataatagcatgttgctggaagaaataactgcattaaagaatgaaataagttcgtttggttttactttggaagatttggtgaatgaagctcccaaacaacaagcaacgagaaagaatgcaattaatttatcagaagaaatatcaaaggatgaagaatttttatcttttatgtatttaaagaaaagattaccaatcaaaaagattgttttaaagttttcagttacagaaaaggtaataaaaagaagcaaaaaatttataatttctgttgtaataataattgataaaaatctcagtgctttaaaaaattggatcagaaagtaggtgaaaagaatgaataggggaataataatggaaattaaaaaaagttatgctatagctttaaatgataatggcataatggaaaagattacacctaagaaagatatgaaaatagggcaaaaaatattttattttgaagatgatgtcattaagtctagtaatggtgggacttataggtataataactttattaagtcaattggagcaattgcagcgttgtttttaatagtattcaccttctttcatactatgaaatctgatacagcatatgcagttgttagtttagatatcaatcctagtatacagatagaagctgatagtaaattaaagattattagtgttgaaggtgtaaacaatgatggaaagaatatagattttactgatgttaaaggtatatctcttgatgaaggaatacaaaaaataagagagaaacttatagaaaaaaaatatttagatactaatagggaagtattggttggatttgcatttataaaaaatgaagataacagtgcttatgagaaagatataaaggacgttattcaatctacatttaatacagaaaaagttacttatgttaaaggtgataaggaagatgttgatgaagctaagacaaaaggaataagcttaggaagatatgaagcatctctagtggtagatgagagtacaaagaataaaatagatatagcaccagtaaaagaaattactgcaagtataaaagataaagaaaatgtaactcagtgggatgcaaaagatgaaaaaaatagtgatgtcgttactcctgctactagctcaaattcagatgcaaaacctgaaaaaacaactgtagataagcctgagataaaaggagcagctgatgattcattacctaatatgggtacagggaaaactatagataacactaaaaaagaacaaaaggatgatggtgtattaaatttacaaccagaggttccagcacaaaatgagaatgataacaagggaaatacaccagtgacaagtcctacaaaggatgacgatactattaatataggtccagataacggaactattgtaaataatcctacatcaggaaaaattcaggaagatcctaataagactatacaagtaccaaaaactgacgagaatacagctaataagcctgttaaaaattagtgagttatttaagggtagatttatctagatggatatcatcaaagatagatctactttttatttgccttatactttagctaaaaaaataaagttgcagtaggaaaatcgtattaaaaaagaggactagaataaaaaattatagtatacttactagtaagtattattaacaaggatttggggagattaaaaatgataaaagagctattaaaagataatatactaatatgtgatggggcaatgggaacatattattcagaaataacaggtaatgatgtatcttattgtgaatttggtaacttaaatgataaagaaactataaaaagaatacataaagagtatattgaagcaggggctaaactaattagaacaaatactttttctgctaatacatatgatcttggagtatcgttagaaacattaatggacataattaagtcaggaataaacttagctaaagaagtaacaaaaaatacttctgttttaataggtgcaagtattggacctattaaaacagataatttagatgaatttagcaatgaagttttagaagaatataaatatatagtagattgctttttagaaaatgggatagatatttttatattcgaaacttttagcaactataattacctaaaaaaaataagtgaatatattaagtacaagaacactgatagatttatacttactcaatttgctgttaagccagatggatttacaagagatgggttaagtgtagccaaattgattaaagaagtacgaaatacaaaatatatagatgcatttgggttcaactgtggttctggtccagcacatatattggaaattgttaaaaaaattgatatagaaaatgaaattgtttcggtattgcctaatgcaggttatccagagataattcacgaaagaacagtttatccaaacaatccattatattttgcaaaaaaagttaatgaaataaggtcttatggagtttctattatagggggatgctgtggaacaaatccaagctatattaaacaattaacccaaatggttaatgagaattctaatgtagtcaatgctaatactaaatctgagccaaaagttaaaagttttgagaaaaaagctaagaatacttttaaagataagctcgaaaatggtgagtttgttgtagctatcgaattatcggcaccaattgatacagatatatcaagaattatagatggagccaagatatgtaaagaaaacaatattgatttagtaacagttccggattcaccaatgtcgaaggttagggcagattcgactattatatcatctaaaattaagagagaaataggaattgaagctatgcctcatatttgttgtagagataaaaatactaatgcaataaggtcaagtttaataggatctcatattgaaaatataagaaatatccttgcaattactggtgatcctatatctgatgctagtaaagttgaaacaaaaagcgtatttaacttaaattcatttaggttaatagaattaatagaaagcatgaatgaagaaatattcaaagaagatagtatttatgtaggcggtgctttgaatttgaatgttttaaataaagaagtagaatataatagaatgatgaagaagatagaaaaaggtgcaaagttttttttaacacaacctatctatgatgataatgctatagagttcttgaagatgattaaagaaaggactaatgtaaagattttagcaggattacttccggttgtaagttatagaaacgcaatgtttttaaataatgagcttcctggagtaactataccagataaatatgtacaaatgttttcggaaaatatgagcaaagaagaagcacaagaaatcggtgtaaaaattactgtggagataggaaagaaactaaaaaatattgcggatggattatatttcattactccatttaatagggttaatatgttaattgaaatcattaagcagattaatgcctaaatcattataattcttatatgaataataaaagacaagagggatttttatgaatgttggtctcattagacattttaaagttgattaccgtaaaagtttttttatgacatcaaaagaatttaaaatttgggaagaaaattataatataaggggtgtaattagaaaagatgtagagcttatgggaataaattgggataagtgttattctagtactcttataagagcaataactacagcacaacatgtatataatgataatataattcaaaatgatctaattagagaaactattattgatccaatatttaaaagtaatttaaagcttccgtattggttttgggcaattggtggaagaatagcatggtatttcaatcataaatctcaacaagaaaataagagtattacaagagagaaagctgagaagtttgttgatttattattaagtgaagccataaaagaaggtacagaaaatattttaattgttacccatggtttttttatgtatagtcttcaaaaagaattgaagaaaaggggctttaggggaaagttaatatacagccctaaaaacggaactttatatttatataaaaaataatagaataactataaatttatgtttgaacaaaacttgatgtaatataaagaaatataagggcagagtcaataaaatatgctatcttttatgataaaaagtatagcatattttttgatatatattattgaaataagtactaaattaagttagtatactttatatacaaatgatgataaggaggaagatatatgataaataatgataatttgatttgtgaagcaaatagatgcttactatgtaagaagccagcttgtaagtttaattgtccagtagaaacgcctatacctgatattataaatatgtataaggaaggaaaaattgaagaagcaggagaaatattatttgaaaataatccgctttcagcagtatgttcattagtatgtattcatgaagaccaatgcaaaggaaattgtataagagggattaaaggggaaccaataagatttcatgatatagagcaagaaatatctcaaagatacatagaagaaacaaggtttaaagctgtttctaaaaagaaagaccgagttgctataattggtggtggtccagcaggaattactattgcatttatactagctaagaaagggtacaatattactatttttgatgcgcatgagaagataggtggggtactaaggtatggaatcccagaatataggctgccaaaaaaattaatagattctattgaagagagattaatggagcttggtgtaaaagttaggcctaatactcttatcggccctgtaataacgttagatagactgtttgaggatggctataaagcagtgtttattggcacaggagtatggaatccaagaacattaaatattaaaggtgagactttaggaaatgtacattttgctattgattatctaaaatcaccagagaactataagttgggtaataaagtggctgttattggagctggtaatgtagctatggatgccgcaagaagtgcaaaaagaaatggagttgaagatgttacaataatatatagaaaaggctttgatcaaatgtctgcaaccaagcaagaaataagagaagctaaggaagataaaattaattttgaattatttaaatcgccattagaaataacagaagatggaataaagttagttaatactgagaatgtagtagagtcagatggaaaaattcaaaacaaagttattgaagaaaagaaagagttttttaaatgtgattcaataattgtagctgtaagtcaaacccctagaactaatatagtttcaaacacaacagaattaaataccaataagtggggattactaataactgatgataaaggaaatacgactaaaaaaggtacatttgcgtcaggagatgttgttactggtgctaaaactgtagtagaagcagtagtgcaagcaaaaatagttgctcaaaccattgaagattactgtgaaaacaactaaataataaaaattaaatataacattgataaattgaggaaaaacagttaaaatcgtataggttgcaaaaataaattttaattattaaaatattactagaagtaaattaacttttttatatactgtgattatcgcatatggtgaaaaaagtttacttaataaggagtgtaaagaaaatatgagtgtcactataaaagatattgcaaaattagctaatgtttctcatacaacggtgtctagagcacttaataatagtccttatattaatgaagaaaccaaggttaaaattatggctttagcaaaagaattgaattatgtaccaaattatagtgctaagagtcttgttttattaaaatcatacgttataggagtatttttttcatcaattagcgaaggaacatcagatacattctttcatgaaattataagaggagttaataatgtcatagataaagaatataatttggttgtaagaggtatagatgattatcaatattatcacttaattgataatagaaattttgatggaataatcgttgtaagccaaagtaaaaatgacgatgaatttatacaaactattttagagaaaaatataccaactgtagttataaatagatatattgaaaatgaaggactagtaaacataatgtcagatgatacaaaaggagtttatgatgcagttacttattttatagagaataatcataggaaaatagcattattgcaaggaaataaggaatttgaatcaacagtatatagaaaaagaggatatataagagcgttagaggataacaatattccaattaatgaggaatatattttaagtggtagatatgaccttaaaagtggatatgagaatatgaaagagctacttaaattagagaatgttccgacagcagtattttgcgctaatgatgatattggggtgggggctatgaaagcaatatttgaagctgggttaaaagttccagaagatatctcaattatagggtttgatgatagcaacttttgtaactatgtagctcctccattgacaagtgtaaggaaggattctttggcgatgagcgaatatggcggaagaaacttattaaatcttataaagaataaagaagtagataaagaaaaagtttatatacaatctcagcttgtagtaagaaaatcagtaaaaaaactttaataatggattttaataattagtgaatttaaacactaattattaaaaaaagttgttaacgttcacaaaaaagtgttgcgttatttgaaatatgatattataataaagttattaagtagatacaagaaaatgttcacgtgaacaaaaaaatgcacgtatttctgttcacgtgaacaaaaaagaaaagaggattttgatatgaaaaagtttatggatgaaaattttttattaagcaacgaagtatctgaaaaattatatcataattattcagaaaaaatgccaattattgattatcattgccacattaatcctaaggaaatattagaagacaaaaagtttgaaaatataactcaagtatggctttatggtgatcattataaatggagacagatgagaactttgggcatagatgaaaaatatattacgggagatggaagtgattatgaaaagttcttagcttgggcaaagactatatcatttgctatcggaaatccactttatcattggacacacttagaacttaagagattctttggaatagatgaagttttaaatgaaaaaagtgcacctgctatttgggaaaaagttaataagatgttaaatagcgaagatttcacagtaagaaatcttataaagaaatcaaatgtaaaagtgatatgtacaacagatgatcctatagattcattagaatatcatttggcaataaaagaagataaaagctttgatgtgaaagtattaccagcttttagacctgataaagcgctaggagttaataaagaaacatttaaagactggtttaacaaactagaagaagtggttggttctaaaatttcaaactttgatgaatatttagaagcattaaaaaagagagtggaatattttcatgaagctggatgtagagtatcagataatgcattggattttgttccagtaggaaatgcttcgttagaagaagttagagaaatttttgcaaacgtacttaaaaatggacaagtatcttttgaagatgaaaacaaattaagagtatatatattaaagttctttggaaaattatatcacgatctaggatgggtaatgcaatttcacatgaattgcgttagagataataacaaagtaatgttcgaaaaattgggacctgatacaggatttgattcacttaatgacacagaagttgcaattccactatcaaggttgttagatgcattaaatagtgaaaaagctttacctaagactattatatatagtttaaatccaaatgataattctacaataggaacattacttggatgcttccaaggagacggaattaagggcaaaatacaatttggatcagcttggtggtttaatgatcacaagattggtatgcaagatcaaattagaactttagctaatttaggtatgctaagcacatttgttggaatgttaacagactctagaagctttttatcttacacaagacatgaatattttagaagaatactttgcaacgtaattggagaatgggtagaaaatggcgagttacctaacgacattgaacatttaggacaaattgtagctgacattagttataataacgcagacaaatactttaatatgtaatcttttatgtatgaaaataagtgagatgcttattttcatacaataatgcaaagatacagaagaagtgaatatttaggaggaatagctgtgaaattaaataaggaattatataaagaatttaaaacatatccagaaaaagtattacaatttggagaaggtaactttttgagagcttttgttgattggcaaatagataaaatgaatgatgaagcagatttcaatggaagcgttgtagttgttcagccattagaaaatggtcttgtggacatgcttaatgatcaagattgtttatacactttatatttacaaggggtccaaaatgggcaagcatcaaaaactcataaagtaatcaatagtataagtaggggaattaatccttacagagactataatgaatatttaaaagttgcagaaaatccagaattaagatttatagtgtcaaatacaacagaggcaggaattgcatttgatgaaaacgatactttgaatggaggatgtcaaaaaagttatccaggtaagctaacagcattcttatatcacagatttaatgcatttaatggagacgacagtaagggatttattataattccatgcgagcttattgatagaaatggtgaaaaacttaaagaaatagtattaagatatgcagaagtatggaacttaggacaagactttattgattggataaacaatgctaatactttttgctgtagtttagttgatagaatagtgccaggatatccaagagatacaattgatgaggttagagaagaacttggatatgatgataatttagtagatgtaggtgaaatattccacttatgggtaatagaaggcccgcagtctataaaagatgaattaccaatagagaaagctggacttaatgtaaaagttgtagatgatatgacaccatatagaacaagaaaagttagaattttaaatggacctcatacagcaatggttccagtagcgtatctttacggtttagaaactgtaggggaagcggttgatcatgaggttataggaagatatgttcacgatgtaatatatgatgagattatagaaactttagatttgcctcacgaagagctagtagaatttgcagatgcgattatagaaagatttcaaaatccatatgtaaagcactatttaatgagtatagcattaaattcattatctaaatacaaaacaagagatttaccaagtttgactgaatatataaagagaaaaggtacacttcctaagaaattagtattttcccttgcatctttaatagaattctacaaaggaaaaagaggagaagaatatattcaattagctgatgatgaggacatattggaattgtttaagaaattatgggaaaaatacgatggaacaaaagaaggtctaaacaaaattgtaacttctgttcttgggtatgaaaagaattggggaagcaatttaaatgaaattcctaatcttgctgatgagatttcaagatatttagaaataattgaaaaagtaggaatgaaggaagcggttaaagtagttttataatgaaatttattatcatgcaattaaattttcttaattgcatgataagtaaatatatatcaataataaaggaggtaaataaatgagttttgatgaaaattgtttttattgttcaaagaatcaagatttagattctttaatgattaagatttgtgatttagatgtatcaacagtatatttgtttaaggaacaaacttatagtggaagatgcaatgttgtttataaggaacataagagtgaaattgcggatttaactgaagaggaagcagcagctttcataaatgacgctagaaaggtagctaaagcaatccataaagcctttaatccagataaagtaaactatggagcatttgctgatactatgaaacatcttcatcttcatatagtacctaaatatgaaggtggcccatcttggggaaaaacgtttgagatgaatccacaaaaaatatatttaagcgatgacgaataccaaaacctaatttgtaaaataaaagataatttataatattggattaatgaataaaaaattaactaaattaaaggtacggaggaaaaggaatgttaaattctgttgacaaaaacgcatcaactaatgctaataatggaaacgttaaattaagcttaagagagaaaatttcttacggttttggagattttggtaatggatttatgtttgacttaggtcaatcatatcttacaaagttttttatagatacatgtggaattagtgctggagcagttggtggtatatttgcatttacaaaaatattcgatgcattcatggatccattagcaggatcattgatagatagtagaaaagcgggtaaatcgggaaagtttagacctgtaatgatgatttcaagtataattcttgctttacttacaattattacttttactatgcctgagatgccgctttcatataagattatatacggttatgcaacatatatgatttggggtcttgtatattcattcactaatgttccatatggatcattagcatcggttatgacaagagatgtagaggatagaagccaattagctacatttagacaagctggttcattaggtgcacaattaataactggagtagcttttgttcctattcttatgatgtttagtgataaaaaagttggttatccagttgcagcggcagttatggctgttatagggatcatttcattctttatctgttttgcaaacacaaaagaacacgttgtagttaatagagaaggtaaatcagaaaaggcatctgctaaagattattttaaggttgtatttacaaatagaccattattatgtttaattcttatgcaattatttacaatatcagctatgaatactaataatcaaatgatgattttcttctgccaatataacttgggagatattgcacttcaaccaaaagttaatggcataatgattggatgttctgtaattggtatatttgctattccattcttagtaaagaagtttggtaaaaagaaaactgcaattacaggattagtaattggaattattgcaaatggattaaactttgtaataccaacaaatgccactacttttacagttcttgttacaataggatatgtagcattagctattccaaatggagtaacttgggcgtttgttacagatgctattgattacggtcattggcatactggaataagaaaagaaggtgtaacttatgctgcatttaacttttcaagaaagatagctcaatcaatcgctgcacttgttagcgcaagtgtattaggtatgactggatatgttgcaaatgcacaacaaagtaaagaaacattgctaggaattaagggagcaatgacattgtatccagcagtagccttagctttagctgcccttgtagtaggtatattacacaacttaccagatgacaagtacagaaaagttgctcaagatttacaagaaggaaaatgggaaaaaggaattttagaatagtaatgatataaatagacattgatatttagctaagaagaaaaaaacactatcaacttatattttgagagttgatagtgttttatctttatatattgagtaaataaaaatatagatacttgtaaaaaactgttaacgttcacaaaaaagtattgcatatttttcgatttgatactataatgtaaacataacttaaataattttaaactaaaattgttcacgttaacaattgctcgacctctaattgttaacgtgaactagggttatttattagattaaagtatttgtaaatattttaatctaataatcaaagaaaaaatgctttgatatataaataagctataaacttatttaatatatagcacagttcttaaaatacagaaaaccaataatacatactttaaaataatatagaattcttcaaacccataattttcatactataatttattaataatattttaagttaaccattttaagaactgtgtatttaattgatagtgatagcacaaaatagatttgttaaaaaataaatgtttgaaattataatatatattctaaaaaagtagtttaaaaggctataaattttaaactacttgatattataaagaataattttagtatctaaaacctgtatatatatttaatataaagatattaattaaaaaagaatttgaggtgtaataatgagaaggaaagaagttttaggtgattatgatctagttcaaaagatgatgtagcagattttttcttaaataaggaagcgaaaatagtcgcagtaaaattagggtcagaaggatgctatataaaagataaaaaagaaggagtcaaggtcgcaggatataatgtatcagatttaattcaagatacagctggggcaggcgatggctttgctgctggatttttagaaaaattatcactaaaagaaattggacaatatgctaacggtgttggagccatggcaacattggtacaaggagatatggaaggctgtccatattatgatcaactgatggaattcataggaaagagacaaggtgttgaaagatagaattttctgaaacagatattactatatttctaacaattgaaaatgttagcgctattaaaagtatttccttcatataaaatgttaattacatttaaggataagtaaagaggattattttgataattaaattttaagtgtattctatctctaaattataaacttcaaataatatttaaaataaacttttacgtatctttagtaatatatagatgcaaattaatattactaattgaaggtatatcaaatattaaaatgataaaatttgcattgttaattgtccattgaaattagtttaagatatttttaatgaaaaaacttaggaggaaataactaatgaaattaaataagaaactatataaagaatttaagacttaccctgaaaaagtactacaatttggtgaaggaaatttcctaagagcatttgttgattggcaaattgacaaaatgaatgaagaagcaggtttcaatggaagtgtcgtagtcgttcagcctcaagaaggtggactagttaatatgctgaatgaacaagatggcttgtttacactttatcttcaaggagttcaaggaaaaagagctataaaaacacataaaataatcaatagtataagtagaggaattaatccatatacagattataatgaatatttaaaagttgcagaaaatccagaattaaggttcatagtgtcaaatacaactgaagcaggaattgcttttgatgagaatgataagttaaatgaaggatgtcaaaaaagttttcctggtaagttaactgcatttttgttacgtagattcatggtgtttaatggagataatagtaaaggttttattataattccatgtgagcttattgatagaaatggtgaaaaacttaaagaaatagtattaaggtatgcagaaatttggaatttaggacaagattttgcgaattggataaatgatgctaatactttttgctgtagtttagttgatagaatagttccaggatatccaagagatacaattgatgaagttagagaagaacttggatatgatgataatttagtagatgtaggagaaatatttcatctatgggtaatagaaggccctcagtccataaaagatgaattaccaatagaaaaagctggacttaatgtaaaagttgtagatgatatgacaccatatagaacaagaaaagttagaattttaaatgggcctcatacagcaatggttccagtagcatatctttatggtttagaaactgtaggggaagcggttgatcatgaggttataggaagatatgtccacgatgtaatatatgatgaaattatagaaactttagatttgccccacgaagaattagtggaatttgcagatgcgattatagaaagatttcaaaatccatatgtaaagcactatttaatgagtatagcattaaattcattatctaaatataaaacaagagatttaccaagtttgactgaatatctaaagagaaaaggggcgcttcctaagaaactagtattctcccttgcatctttgatagaattctacaaaggaaaaagaggagacgaagacattcaattaactgatgatgaggatatattagaattatttaagaaattatgggaaaaatacgatggaacaaaagaaggcctaaacaaaattgtaacttctgttcttgcgtatgaaaagaattggggaagtaatttaaatggaattcctaacctaactgatgaagtttcaagatatttagaaataattgaaaaagtagggatgaaggaagctataaaagaagttatttagaaataagattataaattagtattatagaatattcatatggctgttaaatttaaagttatgaacaataatttaatggaagtaggtagagattaatgaaagaaattataaaaataaatgaaaaagacaatgttgtagtagcgcttagagatttgtctaaaagtgaaattatagaagttgaaaataaaaaaatagaaataaaagaagacataaaaagaggccacaaagtagctatatcagactttaaagttaacgacaatgtaataaagtatggatatccaataggacatgctattaaagatatatcaataggagaatggattcacacgcataatattaaaacaaatttggatggaattatggaatataattttaatcaacagctaaagcaagtttctatagaaaatagaaatcttacttttgatggatataaaagagcaaatggtaatgttggtataagaaatgaactttggatagtaccaactgttgggtgcgttaatggaattggtgaaagaataatcgaaaaattcaaagaagatgtaaaacctgttggaatcgatggagttgaaatttttaaacataattatggatgttctcaattgggagatgatcatgcaaatacaagaactatgcttggaaatttagtaaagcatcctaatgctggaggcgtgttagtacttggacttggttgtgaaaataatacaatggctgaatttattgagtcattaggagaatatgatacaactagaattaaatttttagtatcacaggaagtttctaacgagatagaggagggcgccaaaatattacgtgagctttatgaaaatatgaaagatgataagagagaattagtatctctatcaaatttaaaagttggattaaagtgcggtggttcagatgggttctcgggaataaccgcaaatcctcttgtgggtagtttttcggatttcttagttgcacaaggtggaacaacaatacttactgaagttcctgagatgtttggtgcggaaacaattcttatgaatagagctaaagataatgaaacttttgataaaactgtacatttaataaatgattttaaagaatatttcatggcgtataaccagcctatatatgaaaatccttctccaggaaataaagctggtggaattacaacattagaggataaatctttaggttgtacacaaaaatcaggagattcaacagttgtaggtgtattaaaatatggtgaaactttaaaaactaatggattaaatcttttaagtggaccaggaaatgatttggttgcagcctcagctttagcggcagctggttgtcatatggttttatttacaacaggtagaggaacaccattcggtacatttgtcccaacaatgaagatatcaacaaatactccattatataatttaaagccacattggatggattttaatgcaggaactttagttgaagataaaactttaagtgaagtaacagaagaatttataaaatatgtgattgaagtggctaatggaaaatatgtaaataatgaaattaataaatttaaagagttagctattttaaagcaaggtgttactttataaaattcagtatgataaagtatacttgagtgaaaaaaatataaacaatttagcatattaaattaaaattaatttaatatgctatttttgttataagaattataatttgtattctactgaatgtaatgaatttaattgagcattttaagtataaatccttcaaagataaatctttatttaaaattctagcaagttaaatgattaattaagggtaggattcagaaactcaatttcaacatacataaataagattaaatgattctagcttaattttttaataaataataatataaagaaaatcttattttgagctttaagtggggtatcacgattctgtttgaaggaaagtggattattgtgattgaaaatgaatacattttatgatattataattacaaattttaaaaatgaaatatagccttgggggcagttgtgcttaaatgtacatgataaatatagaattaatataaaatagtttatagtataaaatttgaaggggttttgaatcatggaaattagctttgtaagaattgatgacagattaatacatggacagattgcaactatatggtcaaaagcaagtggatgtaacagaattatggcatgtagtgatgaagttgctaaagatgatttgagaaaacagttgttgcttcaagtagcattaaaaggaattaaagcttatgtaataccaatagaaaccgctatcaaagcttataaggatcctaaatataaaaattttaagactttatttctatttactaatccagcagacgtacttcgaatgattgaaggtggagttgatattaaatctgtaaatgttggaggaatgtgctataaggatggaaaaaaacaaattactggtgctatatctgtaaataatcaagatatagaatgcttcaggaaactttatgagaaagggattgaattagagataaggcaggtagcgaaagataataaggttaatttaattgacaggttaaaagaattgaaatttctatagaaaataacagtggaatgctatatgacctttaatagacagaggggtgtagcattttttttattgtctaggaaagtatagaattttttaattttgaaagtcagtgataccaatggttataaggatattggcttgtaaaaagtggtatcaagaaagagcgtggcgcagccactttgttcttaaaggttaaaattattagacaagtataataaaaaacaaagcaaaagttcaaatgtaatacaattatatggtaattaatttgcctgatttcggtattaatactataattttttacaaagaagttatatttctattgaatatgacgaagaattaaagaactaaatgtaaaaatgttttagagaggagaaatctatgataaagcctataaaaagagcagctgttttacatgatttatgcggaataggaaaagcggctttaaccaatgtaattcctattctatcaactttgggggtggaggtttgtccgatacctactatgatattaacaagtcatactggaggttttagaccaaacatagaaagattggatggatatataagtaaggcggttcaacactatcttgaattgaacataaattttgaaagtatatttgttggatacttaggaagtactaataatattgaagaaactttacttttattagaatctataaagaagaataaatcattggtagtactcgatcctatttttgctgataacggttcatattatagtaattttaataaggaatattcagatagcttaaaaaggataataagatactcgcatatcattacacctaactttacggaagcatgtattctatgtggtgaaaagattgtagaggaagtgagtgaagagaagctattagtgctttctagaaaattatatagttttgggtgtgaaaatgtagtaatcacaagtgtacctatcgcaaataaaaagaagattggaataactgtatataatggagaaaatgattctttgaaattaataactagagataggatagaaagatcgtatccgggaactggagatgtttttacatctgttttgattggattaattatggatgacaattcattagaaaagagcgttgaggaatcatgcaaatttgttgaagattgcattaaggaaagtagttcttatgattatccagtaagagaaggattacttttagaaccaatattgtataagttaaataatttgaaacggtcaatagaagaataaaatatttaaattcgaataaaaacaatcaatataaatcaatatatgtgaaaataaatgattttttttgaaataaaatggttgatttttattgaaatataagttatgattatatcagaggagtgatgataatgtttacagaagaaaggtttaatatcattcttcaggagttgaaggtaaaaggaatagtatctgttactgatttagtaaaattactggatgcttcggaatctacagttagaagagatctaaatacacttgatagtgagggacttttaaagaaaattcatggaggtgcaattgcaataggtgagagtacatccaagcacgactataaagttaatgttagacaatctttgaatgtagatgaaaaatctgaaatagcaaagcatgctgctgcattaattgaagatggggatatgctctacttggatgctggaacaacaactgagatcttaatagattttattgaagccaacgaaataatagttgtaactaatggaatagttcatgcaaaaaagcttttggaaagaggttttaagacttttattgttggaggcgaagttaaagctataactgaagcaatagtaggaagtactgttgtagaagatttgaaaaaatataacttctcaaaaggcttctttggagtaaatggcgtaagcaacgagagcggttatacaactccagatatgaatgaagcaatggttaaagctcaagcaatgaaaatgtgcagagaatcatatgtattagcagatcaatctaaattagaaaaagttagttttataactttcggagcaatagcagattcaacattaataacaacaaaaattgataataatattagttatgatactaatgtaatagaggtggtaaaaaatgattaatacaataactcttaatccttctttagattatattgttaaagtcgattcatttaaagttgattcattaaatagaactgaagaagaaaatatttatgcgggtggtaaaggaattaatgtatccatagttcttaaaaatctaggggtagcgaatacagctcttggatatgttgctggatttactggagatgaaattctaagacaaatacaaagccatggagtaaactgtgattttataaaattaaaaagtggattttctagaataaacgtgaaacttaaaagtgatggagaaacagaaattaatggatctggacctgcaataactgatgaagagttaaatctcttacatgaaaaactttcgcatctaacaaaaggtgattatttaatattatcaggaagtataccaaatagtgtgccagataatatatatgaaagcattatgaacagcttattggataagggtgtagagttcatagttgatgcaacaaaagatttgctattaaaggtattaaaatataaaccgtttttgataaaaccaaatcatcatgaacttgcagaaatgtttaatgtagagttaaaagatgatgaagacataattaaatatggtagaaaacttcaagaaatgggagcaaaaaatgttcttatttcaatggcaggggatggagcaattctactacctgaaaatggagaacctataaaaagagctgttccaaaaggaatacttaaaaattcagttggggctggagattcaatggtggctggtttcttatgcggatatttgaaaaataaaaatatagatgaagcgttcaagatgggaattgctacaggaagtgcaagtgctttctcagaagaattggcaacaaaagaacaagtatatgaattattaaagcaaatttaatagtgaatttactatagtgtgagttgaatcttattatattttaaagttttaacaagaataatttaacaagtattatgatttttacaaaagcataaaaatatatttaaattttaggaggctaacaatgaggattgtagatttattacacaaacaaggcataaacttaaattttaatccaaatacaaaagaacaatgcataaatgaattagttgatttaatggacaaaactgggaatttaaataataaagaagaatataaaaaagcaatattagccagggaagaattaagtacaaccgggataggggacggaatagcaattccacatggaaaaacaagtgcagtaaagaaagcatcccttgcagctgcaatttgtaaaaagggtgttgattatgattcgttagatggtcaaccagcgcatcttttcttcatgattgctgtaccagataataatgataatttacacttagaagtattagcaagattatctactatattaatggatgaatcatttagaacaagcttagtaaactgttctgataaagaagagtttttaaggttaatagataagaaggaaatggaaaagtttcctgaagaggtaaagggggaaatagagatgaataaaagtggttatagagtattagcagtaactgcatgtccaacagggattgcgcatacttacatggcagctgaaagtcttgaaagtaaggggaaagatatgggagtctcaataaaagttgagacaaatggttctggcggcgctaaaaacgttttaacaaaagaagaaatagcaaatgcagaatgtataattatagcggctgataaaaatgtagaaatggctagatttgatggtaagagagtaattaaaactaaggttgcagatggaatacacaagtcaactcaattaattgaggaagctataagtggaaatgctccaatatatcatcatgctggaggtgctgatagcagcgaagatgtttcaaacgaatctgttggacgacaaatttataagcatcttatgaatggtgtatcacatatgttaccgtttgtaataggtggtggtatattaatagctttagcattcttatttgatacattcaatcctgctaatccaagtggttttggttcaggtacacctattgcggctgtattgatgaagattggtggtactgcatttggattcatgttaccagttcttgctggatttattgcaatgagtattggagatagaccagctctttcagtaggttttgttggtggtgctttagctagtgctggtattacttttgcgagtgcttttgatccaaaggttccagcagtttctggtggtttcttaggggcattacttgcaggatttattgctggatatttagttgttggtcttaagaagttatttgcaggtttaccaaacagtttagaaggtataaagccagtatttttatatcctttactaggaacatttttaatcggtgttataatgttattcataaacccaataatgggatcaataaatacaggtatcactggtgcacttaactcaatgggtggtacaagtaagattcttttaggtattgttttaggtggtatgatgtcagttgatatgggtggtccagttaacaaagcagcttatctttttggtacagcatcacttgctagtggaaactttgatataatggcagctgttatggctggtggtatggttccaccacttgcaattgcaatatgtactacagtatttagaaataaatttactgaaaaagacaggcaagcaggtcttgtaaactatataatgggattatcatttatctcagaaggtgcgattccttttgcagcagcagatccaataagggtactaccatcttgtataattggttcagcggttgctggagctctttcaatggcatttggatgtgcattaagagcacctcatggtggaatatttgttattgcaatagtaactaatccgcttcaatacttaggagcaataatcattggtgcagtagttggggcaataatattaggaataataaagaaaccagtacaaaaataagatttatgggaaaataagagggtaagttaatataagggtataggaagcagtggaagttaaaaaagccactgcttcttttattgaattctaataaaaatgaaagggaaaatatttctataaaaaaggataaaatataagattttcttatatatcttttttatggaattgtatcatatgttacgtaaaaatataaaataatatggtattataaatttacaaataaaacataatataaataagtattcgaagtaaataaatatggatttttaaattgttttaagtttaaaaataacaaaggttttattttctagttaaacacttttgctataggaggagaaaaaatatgagtttatttttaggaaagatacattattggttatttaataagattttatggtttgaaaaattagaaggtgagataataaatcttgcaaaagaggaaggcttaaatgtagatgagttgcgtaaagaaatcaatgaaaagtatggtgagccaactccagatcttccactagaagagatgatagatacaagtaacatccatggatggttacaaggaaaaattcattcagcagagggaagaatggctgcatggacaacaaaacttgtaaataataataaaggtgttactgtaaaattagaagagatatattcaagtcaaggaattaaagctgccagcgaggttaaagaaaaaagaatggaacttacaaatgcaggtgagatttttgacagtatcaatgactatattttagatggaatgccatgtgatagagtcaatgaagtaattaaagcagaagaagatatggttgaatggaagagaagagtatgcgttcatagtgatatttggaataaagaagaaggtgatgttaattatttctataaattaagaagtttatgggttaaagaatttgtaaatgcagtcaattctaattttgagtatatggaacaagacgataatgtaatggtgataaaaagaaaataatattcttagaattaagaatatttatgggttaataatttaagaatagtagagtacccaactatatttttggttatacgatgattaaatttatcactattatttgtaatgaaaatatgcaataggaggaaaagatatggatgctatagatttaatgatggaagaacataagtatataaaaagaatgttggtcgttgtaagaaaagcttgttttagattatacaaaggtgaaaaaataagttatgatgattttaattctatgataggttttattagaaactttgctgattctcatcatcataaaaaagaagaagcaatgctttttaatagaatggttgaagaaataggtccaactgctgaaaaaatagtgaagcatggtatgcttgtggagcatgatcttggaagactacacataagtgaacttcaagctgcacttaaaaatctaaaagatggggatgaagaagctattttagacgtaatttctaatgctatctcctatacgcatttattagagagacatattgataaagaagataaagttgtatatacatttgccaaaagagaattaaacgaaggcacattaacaggtataaataaggagtgcattgacttcgaagaaataaataatcacataaaaaaagataatattttaatattggaagaattagagaaaaaatataattcataagtaaaaggtgttatagtgagaagcgactgtaacacctttatttttatatataagtatacacttaatgggtgtataaaaaatactgatttatgtaatttagaaatcagtacagcctaattactttcttgattttttataagtatatggttttgtgatagggctttagacaaaaaatatttttctaatgatagaatttgaataaaaaattatagcaagataaagtataaaaaactttatcttgctataaaatatcctccaaagtatatttgctaaattcatcaacaaaagaattaatagatgacgataatatggcttttaatttacattttgaagtggaacaagtatgctttgcacttgaaaaacattcagatacagttatactttcctctgtaattattaatattttcccaaggtttatgtctttaggctccaacccaagttttaaaccaccatttcttcctttagttgatattacatattcagttttacctaatcgatggacaattttctttaaatgatgttcagatatttcaaggttagatgctaattcttctactgtacatattttgtcttgattcttagctaaatatattaaaattctaaaagcataatctgaaaacttagataagttcaaattttcacatcccttctgtagttttattataccttataataaaaaaaagtaaattggttaaaaataaaatgtgcatttgtattgcacattaaaaaaacctgtgctaatattaaggtgtatttagaatgcactttaaaatttatacatataaagaaattatatataataattgcatttatgaagtttagataggtgttaaaaacatagttaattaaatattagttagataggagaattgttatggataagagtttgttaaaagtgtgtgatttaagaattgaagcagatgataaagagattttaaaaggattaaatcttgaaataaataaaggcgaagttcacgtaataatgggacccaatggagctggtaaatctactctagccaatgctcttttaaataatcctaaatataaaagattgagtggggatatagaattcgaaggggaaaacataaatgaattaaagactgatgaaagagctaaaaaaggtttgtttttgtcatttcaatatccagaagaaattccaggaataactgtagagaatttcttaaagtatgctaagagaactacagatggaaatgtgctaaaacattttaagtttgacttagatttaaagaacaatatgaaggaattaaaaatagatgaaagctatgcaagcagatatttaaacgtaggattttcaggtggagaaaagaagaaaaatgaaatactacaaatgttaactttaaatccaaagttagcaattttagatgaatcagattctggactcgatgttgatgctataagaattgtttctaaaggaattaaaatgttctcaaatgaaaacaatggagttttaattataactcataatacaaaaatattagaaaatttaaagcctgattatgttcatgtattagtagatggaagaatagttaaaacaggagatggaagtttagctaatgaaattgaagaaaagggatatgaatcttttaaagaaaatgtagctatataaaggtggtgaaataagatggaaaacaaaaagaaaacttatatagatgaaatggatagaggaatctatgatgttaaaaatgaagacagctttagttttaaatctgataaaggcttaacaaaagatataattgaaactatttcagaagaaaaaaatgaaaccaaatggatgagagattttagattaagatctttagaaatatataataagttgaaattaccaacatggggaccatccttggatgagctagatatggataacattgtaacctatgtaaggccaaaaagcagcttagctggttcttgggatgaagtgcctgaggatataaagaaaacttttgatttactaggaattccagaagctgaaaagaaatcacttgctggagttggagctcaatatgactcagaagtagtttaccacagtataaaagaagatttagtaaaacaaggcgtaatttatacagatatggaaacagctttaagagaacatggggatttggttaaagaatattttatgaagtgtgttacacctaatgatcataagtttgttgcacttcatggagcagtttggtcaggaggatcttttgtgtatgttcctaaaggggttaatgtagacataccgctacaatcttatttcagattaaattcacctggagcaggacaatttgaacatacactaattattgtagatgaaggagcaaagcttcattttattgaaggctgctcagctccaaagtatagcgttacaaatttacatgcaggctgtgttgaactatatgtaaaagaaggagcaacactaagatatagcacaatagaaaactggtcaaagaatatgcttaacttaaacactaagagagcgattgttgaaaagaatggaacaatagaatgggtatcaggttcttttggttcacaaatatcgatgctatatcctatgagtatattaaagggtgaaggcgcaagagcagaatttacaggtgtatcttttgcaggtaagggacaaaacttagatactggagcaaaggttatacatgctgctccaaacacttcttctactataaactcaaaatcaatttctagaaatggcggaaaagctacttatagaggagtgttaaaggtaaattcaaatgcctataattcaaaatctatggtatcctgtgaatctctaatgttagataataaatcaaaatcagatactattccagtaattgatttattaaatgatgatgttgaaattggccatgaagcaaaaataggtaagataagtgatgactctattttctaccttatgactagaggaataagtgaagatgaagctaaatctatgatagtaagagggtttgtagaacctatatcaaaagaattaccattagaatatgcagtagaaatgaacaatttaattaacatagaattagaaggaagcatagggtaggtgatagaaatgaaggctatacaatttaataatctaaataaaactccaataagaactaaaagctgggttaatattaatgatataagccttggagaattaaatattggagaaattaaaaagtttgataacgtagaaatcaagggcataaaaggtgttgatattcaaaagttagaaaatgataaaatattacatttatatagagagtttcaatatggagtcagtgaagatttaataaaccaaggtaaagaaggtttcaaccaaggttatgtaataacaataggtagaaatataaaaactgaagaaccaataattatagaatttaatttggataaagataatagctccttagtagataatttaataattgtgggagaagaaaattcaaaagcttctattatagtaaagtataaatctttggacgattcaactggttatcataatggaatttgtactatctattcaaagaagaatagtaaaattaaattaactaaagtgaattttttaaatgaaagtaccgttcatttagattctaatgtttcagatattgaagaagatggaaaggttgattttatatcagtagaccttggcggacgatatagtatttacaattatcatggagatttaataggtgataaatcagctgccaatataaattctatttacttaggaaataaagataaacttatagatattaattatattattactcacaaaggtcaaagaagtaattccaatataaatgttaaaggagcacttcaaggaaaatctagaaaggctttcaaaggaactttagattttaaaactggtgcatctaaaagtgttggtgcagaagacgaatattgtatgctcctttcaaaagaagctagagctaaagcaatgccagtgctattatgtgcagaagatgatgtttcaggagaacatgcagcatcttcaggaagaattgatgaaaacaaattattttatttgatgtccagaggattaagttatgatgaagctaagattgttattgttagagctgcatttaatccaataatagattcaattgatgataatgacgttatagaagaaatattacaagaagtagacaggggacttaaaaatgaataatgtagattttttgaaagatttccctgtttttagggccaacgaaaatggggaaagattagtttatttagatagcggtgctacaactcaaaagcctgttcaagttttagaagctattgaaaactactataaagtaagtaatgcaaatcctcatagaggtgcttataagttaagtattgatgcaacaaaggcctatgatgacgctagagaaaagattagaagattcattgatgcagaattttcaaaagaagttatttttactaaaaatgcaacagaaggttttaatcttatagcatcctcttatggaatgaataatataaatgaaggtgatgaaattgtaatttcaattgctgagcatcattcaaaccttattccatggcagattgtagctagagctaaaaaagcaaccttaaaatatatgtacgtaaatgaaaacggagaaatttcagaagaagaaattaaagataagattactgaaaggactaaactagttagcataacccatgtttctaatgcacttggaactataaatccagttaaagaaattacagaatatgctcattcaaaaggtgctaaagtgattgtagatggatcacaaagtgtaccacatatgaaggtaagtgtaagagacttagatgcggatttcttagtattttcaggtcataaacttttaggtccaatgggaattggtgtagtttatggtaagaaggagcttttggaaaacatgcctccatatatagttggtggagatatgatcgaatatgtttatgagcaggaagcaacatttgcagaactgccatctaaatttgaaggtggaacacaaaatgttgaaggtgctgtagggcttgcagcagctattgattatctagaaaatataggtatggataaaatagatgaaatagaaagagaacttacaagttatgcaattgaaaaattccaagaaatgccttatgtaaagctatatgggcctaaggatttaagccatagaggtggaattatttcttttgacatagagggagttcatcctcatgatgttgcttcagtttttgattctcatggtgttgcaataagatcaggcaatcattgtgctcagccattaatgagatatatgggtataaatgcaacctgcagagctagtttctacttttataatacaaaagaagatgtagataagttaattgaagcaacaaagaaaacatatgaaatgtttttaaaatggaggtaatttagatggatttaaatgctatttatacagaacttattatggaacacagcacttctaagcataataagagaaacttagatcacccagatattaaggaaaaaggtcataatcctagctgtggagatgaaattactttagaacttaaattaaataatggtgttattgaagatttagctttcacagggcaaggatgtgcaatatctcaggcatctacatcaataatgatagatttgataaaaggtaaaaatatcgaagaagcattaaagcttacagaaacttttatcggaatgattaaaagagaaattaaagatgatgaagaattatatgcattagaagatgctatggcctttaaaaatatctctaacatgccagcaagagttaaatgtgcagttttagcatggcatactttgaaggaagctttggaaaaataattattatatagtatagaacctagacattatttaaaatcaaacgaaatgcaaaatgtgtttattttcagtcaagtaaaaactttaaattcttatacaaatatagaaaaagctagtacctatttttttattaatatgaaagttgtggtatgtgaaaaatataaatttgaacatttcaaaagttataatactctcatgtatttccgttggaaacatacgaataagtgagaatattataacttttgtttatttaatctaaaattatactatcatttgaagaacatggaattacttcattgaaaaatacatactatcaaaatcttttagtaatactataaatgaagatagaattaataattaacaatatagaaacaaagagaaaatgaggtaaatacaatgagaaaaatgaaaactatggatggtaacacagctgctgcatatatgtcatatggattttcggaagcagcagtgatttttccgataactccatcatcaccaatggcagaacatgtggatgaatgggtttcacaagggaaaaagaatatttttgggcaaccgttaaaagttgttgaaatgcagtcagaagcaggtgcagcaggtgcactgcatggttcgcttcaagcaggtgcattaacaacaacatatacagcatctcaaggattattactaatgattcctaatatgtataaaatagcaggagaattgctgccatgtgtcatacatgtagctgctagagcccttgcaacatcggcactaagtatatttggagatcatcaagatgttatggcagcaaggcaaacagggtttgcaatgcttgcagaaggatctgttcaagaagtaatggatttaagtggagtggcacatttagctactataaaatcacggataccttttatgaatttttttgatggattcaggacatctcatgaaattcaaaaaatagaggtaattgaaccagaagaacttgttaaggtactagattataaggcacttgatgaatttagaaaaagagctttaaatccaaatcatcctgttataagaggaactgctcagaatcaagatatttactttcaaatgcgcgaggctgtaaataaatactatgatgatgttccggaaattgttgaacaatatatgactgagattactaggcttacaggtagatcatatcattgttttgattattatggagcacatgatgctgatagaattataatttctatgggggcagtaaatgatgttatagaggaaactgtagattttctaaataataataaacaaagagtaggtcttgtaaaagtaaggttatataggccattttcagtggataaactattgaaggctattccaaagactgtaagaaaaattgcagttttagatagaacgaaagaaccagggtcagttggagaaccactttatctagatgtatcaagagcattttttggaatggataatgctccgattgttgttggtggaagattcggacttggatcaaaagatccgacaccagctcatattgctgctgtctatgataacctatttttagatgtaccaaaaaataactttacaattggaataattgatgatgttacaaatacatctttaagaacatttgaacatatagatgccactcctgatggaattacatcatgcaaattctggggcttaggatcagatggtacagttggtgcgaataaaagtgcaattaagattatcggagataatacagatatgtatgctcaaggatattttgattacgattctagaaaatcaggaggacttacagtttcacatttaagatttggtgataagccaattaaatctagatatccaattgatagaccggattttgttgcgtgtcataatcaatcttatgtgtataaatatcatgtaattagagggttaaaaaagaatggtaaatttatattaaatacaatttggacgcctgaagaattggatgagagattaccagcatctataaaaaggtatattgctcaaaatcatatagaattctatataataaatgcagttaaaatagctcaagatgttggccttggaggaagaataaacatgataatgcaagctgcattctttaaaatagcaaacataattccagttgaagatgctattaaattcttaaaagaagcagttgttaaatcatatggtaataaaggcgaaaaaattgttaatatgaatcacgcagcaatagatgcagggttagagggaataactaaaattaaggttccttatagttggaatactgatttagacgataaacttgagcttgatgagaattttccagaatttattaaagaaattactaggccaatgaataggttagagggcgattcaatgccagtgtcccatttcgtaaaagcaggaatacaagatggtacttttatgtctggaacaacgtcttatgaaaagagaggaatagctgtaaatgttcctgagtggataccagaaaattgcatccaatgtacacaatgttcatatatatgtccacacgctacaattagagcattcttgctaaatgaagatgaaaaagaaaaggctcccgaaagtctaaaagtattagatgcaaaaggaataaaaggtgatgaaaagttatatttctcaattggtgttactccgcttgattgtactggatgtggtaattgtgcacaagtatgtccagcaccaggtaaagcattagtaatgaaatcacaagatagtcaacatgagcaaattgaaacttggaattactatatggaaagagttaaacctaaaaatccgctaaataaatacactcttaaaggaagccaatttgaaagaccattacttgagtttaatggagcatgtgcaggttgcggtgaaactccatatgcaaggcttgtgacacaattatttggtgatagaatgatgattgcaaatgctacagggtgctcatcaatttgggcagcagggtcatatgaaatggcatatacagttaatgaacatggtcatggaccagcatgggcaaattcattgtttgaagacaatgctgagttcggatatggaatgtatttaggtgttaaaacaataagagagagaatagcgaataatgttgctattgcccttgaaagcaatatgtcagaggaaactaaaactgtacttagagaatggttagataataaagatattggggatggaacaagagaaagggcaaaaaggctagttgaagctcttgaaaaagaaaatagtgaaattgctacagagatattaaaggatagagaatatttcgtaaagaggtcacagtggatatttggaggcgatggctgggcttatgatataggttatggtggtctcgatcaagtgatagcaatgaatgaaaatgtaaatatattagtatttgatacagaaatttactcaaatactggtggtcagtcatcaaaatcaactccgacagcagcaattgcaaaatttgctgcatctgggaagaggacgaagaagaaagatttaggaagaatggccatgacatatggatatgtttatgtagctcaagtttgtatgggagcagataagaatcaaacgattaaagctataacagaagcagaagcgtatgatggtccatcattgataatagcatattctacatgcattaatcatggaataaaagtaggaatgtcaaatactcaagaagaagaaaagaaggcagttgattgtggatattggcatctttatagatataatccagcgttaaagggagaaaagaatccatttatattagattctaaagatccaaaaggagattttaaagatttcttgatgggcgaagtaagatattcatcacttgctaaagcatttccagaagagtcagaaaaattattcgagaaaacagaatctgaagcgaaagaaagattagaaatttataaaagattggcaaatcaacaatgattgtatagaaaagattaagcacaaaatattgtaatttaaatttagtaggaaataacatattaactctgtaactaggggttgatatgttatttttttatataaatattctttacgaataatttattatacatataaatattattaaatataaatattataaaggagttaagtgtgtataaattaaaagaactgaatattgtacacattagaatattctatatagaaatcattcataaggattccgaagagagacatggaggagtttaaatgaaaaaaaatatattgatggaaagaatttttcatgatattaattatgataattatgttgtacagtatcaaggagatattgaagctgagatctctaaaataccaaattattatgttacagtaatcaatgatagatatgcaattgtatctgttaaaaaagatgtagaaattaatatggggaatgaaccatatatttcatcagttgtatatgtcattcctgcagaattttatactttacaagatatttcaccggtagatgcatctcaagctagctttttacaaactggatctcaattaaatttaacaggaaaaggtgtaaatgtagcaattatcgattcaggtattgattaccttagtgaagagtttatggatactaatggagaaacaagaattgagaatatttgggatcaaacgttgataagtaatgcggaaaacggttcggaatctgtaccatttggggtgctatttgatagaaataagataaatgatgctataagagcaagtagggagggaggatctccagataatatagtcccaagcagagatgaaattggacatggaacgaatatggctggaataattggagctagtggaaagaatccgaatttaaggggtgttgcaccagactgcaattttgtagtagtaaaacttataagagatttctcatatgaggtccagtttccagatgtaatagttcctgtatttaatataactgctatttttgcagctttgcaatatgtatatgaatatgctttaacgactaacaaaccaatggttatatattttcctcttggaagtagtttgggaaatcataagggagagggtatactggaagactttatagatgcaatatcaagtaatggaggaatggcggtagttactggtactggaaatcagagggatgctggtggccacacatctggttcagtaactcagattgttggagtgcaatcacctggtgctggggttgcggagttagaagcgtcacctgaacaaaaaaatatatgggtgcaaatatgggctgatttgcctaacataatgacggttgaaatagtttcaccatcaggggaaagttctgggatattgagtttaataattaattacactataaatcatacttttatttttgagaagacttcaattagagttaatttttattttccagaagaagtaactggagatgagttgataaggataagattttataatttgcagcctggtatatggagaattagaatacaggcgaactatatttctaatggaagatttaatgcttggataccacaaaaggggctaacagttggggacacaagatttagtttctcagatccatttggaactataacaaatccagggaactccatatatgctataactgtagcggcatataatcaaaataataacaatattgttgatttttctggtatggcttttttggaatcctacactgatagaatagatgttgcagcaggtggaataaatgcactaacagttgctccgaataacacaacagcagtagtaagcggaactagtgtatcagcggctgttgtatctggagtttgtgctatgctatttcaatgggggattgtaaatggaaatgaacctaatatgtatgcacaaactattaaagcatatcttgcaaaaggagcaatggcgagaagtggagatattactccaaatccatattggggttatggtatattgaatgtgccaaggatttttgaaaatatgacatagagaaagagtaattaaggcaatactttaattatctttttacgtgaggattaagtagctagagggggaattatatcagcgagaggaaatattaaatcatgtgtgttggtagaattttaaatttttactttgattatttaggtgaacatttattcagctaaaacatactataatataaaatgaattttgttctctaaagtttggaggaaaaatatgagatatgaaaaaattgaattaacgtattcgtataattcactagaaccatacattgatgaagaaactgtaaaagtacactatactaaacatcttcaaggatatgttgataaactaaataatgttcttaagggatatgagaaatttacagagggaaaaaccttggagcaaatactttcaaatcccaataaaatacctaaaaaaatttatcgcgatgttataaatcaaggtggaggtgtattaaatcacaatttatatttttcaattcttttcccttatcctaaaaaggaacctgaagggaaactacttaacgaaatagttagtacttttggttcactagaaatgttaaagaagcttgttagcgaagctgcaataaataaatttggatcaggctatggctggctagttaaagataaacgtggtaagctgaaagttgcaaatagttcaaatcaggatacacctctaagttttggatttactccaatactaacaatagacgtttgggagcactcgtattatctgaaatataaaaatttacgtggagattacgttaaaaacatatggaatttaattgactgggcgcgagttgaggaattgtataagaatgataatttggtttgattttaatttccgtcaataaagagggctttactttagttaaagttctcttttccatatgtactaaaataaagatggcatatagtaaattattatacacaatttataaaataagaattataataaaggaaaatttaaaattaatttttggggtaaggagagcatatatgacggaacttaaaaaaatatcaggaccaagattaaagagtttgttagaggaaaatataaatattaaagagaaactcataaatgaaaaatatttaacaaatactttagttagaaatagttgtttagaatatataaatgaagaaaggatagagattagtgcatgcaagtttgaaaatgttgtgttcagtgaatgttgtttaagaaatgtagatttagcagatataatatttgaaaattgtgatttatcaaatattgatttttcaaatggaagtatacatagggtagaatttaataattgcaagcttttaggagctgattttagtgatagtagtatacaagatgttctttttaaagatacagttagcaggtactcaaactttggatattcaaaagtcaaaaatgtaaaatttcaggaatgcgatatgcaaagtagtatgtttttggaatgtggctttacttgtgttacatttaatggatgcgatttagctaactctgagtttactaatactcctcttaaaaaagtagattttagggaaaataatatatcagacatatcgctaactggaagagagctaaaagatgctattgtatcgcctatgcaggcagtagagctagcaaggtttcttggtgtaatagttaaatagtattatttgggttgcagtaaaattatctgtaggcgatttatttttttgttttaaggattagattttttttagttagggtataagtttcgaaatatttttgaaagattgataaacttatgaagagtgatataataattgtaatgtaaaattaatttaggaggaacaataagtggaaaagatagcattaattactgatagtgcatcggatataagtatcgagttattagaagcaaacaaaataaggcttttgccgtttaaaattatatatgcggataaggaatacgaggatagaattgatataactccacaatttatgtatgaaagattaaaaacagaaattccaaaaacatcgctaccaagtattgaaaaaataacaagcgttttgaaagaagttgttagtgagggatttacgcatgcaataataataactatttcatctgctttttctggaacatataacgcagtaagattaatttgtgaggaatttgaagagttgaaaacttttgtttttgattctagaacattaacaatggcagaaggtgcaatggttttagaaactgcaaggttaattagagaaggtaaaacatttaatgaaataattgaaattctacctacatacagagagaagatagatttattttttacaatagatactttagaatatcttcaaaaaggaggcaggattggcaaagtggcaggaacaataggagagtttttgaatcttaagccaataataactgtagcagaagatggaacatatagaactgcagctaaagttagaggttcaaagcaagctgtatctaaattaactagtatatttaaaatgtatttagaaaaaggtagatataaagcttggattttagatggaaatggcttcgataaggtacaaaacctatactatttgataaaagatttacccaatgtagttgaatgtacaatagctggaacaataggtccagcgcttggtgtaaatacaggaccaggacttgtaggactcgcaatcgagagagtagatgaataagttgctataaataaacttctagtaagttaagtgaaattaaatttctaacttactaggagtttaatttttgtatataaatattttttagtatataggaaaaactattctttataaaaataaagaaaaacaggaggaattaaaatgaattttccaacatcttttccaaaacaagaacaaaacgaacagccaggactggagtatgaaatgaatccagctccaatatatgatgatccaaattataataaaaaaggagatatattaaaggacaagattgcagtaattactggaggtgatagtggaataggaaaggctgttgctatagcatatgccaatcaaggtgctgacatagtgattgcttattataatgaaaataaagatgcagaagaaacaaaaaaaataatagataatataggcagaaaatgtaccttaattaaaggtgatattagtgatcctaagttttgtaataatgttttagaaaaaactattgaagaatacggaaaaatagatatattagttaataatgcagcggttcaatatgagagtacagatttcaagcaaataagtgacgagcaatttgataagacatttaagacaaacgtatatggaacattttatatgacaagggcagcattaaatcatttgaaagcaggcggatgcataataaatactgcctcaataactgcatataagggaaatgaaacattaattgattattcaatgactaaaggcgctatagttacattaacaagatctttatctactgcattagcaaaaggaaaaactaatataagagtaaatgccgttgcacctgggccaatctggacaccattaattccggcaagctttgatgaaaaaaaggttgagaaatttggatcggatacaccattgggaagagctggtcagccagtagagtgtgctggagcttatgtgtttctagcttcacaatgtgcctcatatatcacaggacaagtgattcatgttaatggtggagaaatagtaaatgcgtagattaaacaaataaatttgtacataatgttttggataacaattttatataagttatattaggaaatttatattgtaagcttacttttagagtggcgaaactaatagtaaaacttattatataaattatataaattatataaatcaaaatcatgattttaagattgtaaaatattgattagaaaatctagagccaggaataaaatcttggctcttttgatttaagtaacgtttccatagaaattaaaatatattaatgaaaaatgctaaaagaataatactagcatttatgtttgtggaaactatagattaaaatatactatttatcaacagaagatagtagttagagttatggtatcaaatagataggtatatatgtaatgcttgtttgaaaggtataataaaataaaaaatcttgactacacatagatgaatatctatactatatacatagattaataaaatggttaatattgaaaaaggagttaaatgtgtgtaagaaatatgataagaatggaagaattttaaaggcactttcagatcctaataggctaaaaataatagacttattatcttgtggagaaaaatgtgcgtgtgagatattagagagttttaaatttacacaacctactttatctcatcatatgaaagtattaatagattgtgggttggttaaagcaagaagagatggaatttggaacttgtacaagttaaacacaagtaattgtaacagattagtgctgtttttacttaatctaattacagaaaatgaggattgcgcacaaaatgataagaaaaatgaaggttctaattaaaagttaatatgaaagtacgattttgttaacctttataatatattaaatataatgtacttattaaaaataataaaaatttataaaaacggagatgaaatgaaacagattgatttaactaaaggaaaaacactgaaggttctaacaacattatcagtaccaataatgggaagttcattgctacaatttacatataatctggttgatatgctttgggttggcggacttggaagtaatgctgtagcgagtgttgggtcagcaagttttttcgtaggtcttggatattccataaactcattagtggttataggaacaggaataaaagtagcacattctataggtaaaaaagaagagaatgaggtaaaagagtacattaatgcgggccttttaattaatgcagtaatgtcgtttgtttttggggctatacttattatattaggaagaacacttgtgaattttttaaatattaacaatatttcggttgagaaagatgcatacgaatttttggctttcagtggaccgacaataatttttgcattttttaatcttttatatgcaagaatattggggagctttggaaataataaattagcatttaatataaatgttgtaggagtagttgcaaatataatattagatccaatttttatttatgctgtaaaactaggagttgaaggagcagcaattgcaacaatgattgctaatattataatgtttttgttatatttatttagatcatcgggaacacttaggtataattttagtgtaaaaattgattataataagataaaggaaataataattttaggatttcctatggctatacaaagaattctatttactgtaataaacatatttcttgcaaaaataatagctatatttggatcagatgcaatagctgctcaaaaaataggacttcaaattgaatctattacatatatggttattggtggccttcatggtgcgatagctgcatttacaggtcaaaattttggagctaaaaaatataaaagaatcaaagaaggatataacactgcgcttaggataggaattatatattctcttcttatggcatttatattcatgttttttagtacaccatttgttaaattatttgttaaagatcagcaaacaattgcaatagcgaatatgtacttgcaagtagtagcattttctcaattatttagtactacagaaactgtatctaatggattatttacaggtataggaaaacctaaaatatcttcaattataagcgttatattcacagcactacgaataccaatggctttagctttaataaaaccatttggtttaaatggtatttggataagtatttctatatcaagtattctaaaaggaagtatagcttatatattatatataattgaggtgaaaagaaaatataaatagaaattaataaaatatatagataaaatttatatggggaggcagtcaatgttaaatgaacttaaagaattatttacaccttttgagttattaaaaggtaattatggtatagaaagagaaagtttaagagtaaataataaaggggagttatcagttaaaagacatccagcagtgtttggtgagaaagtggaaaacaaatatataactacagattttgctgaaagtcaaatagaagttataacaccaccatttaaaaatatagaggaaacttataatttttctaaagtgctatatgatattgttgcaatggaaactgaggatgaatacttatggccacagtctatgccgggaatagtacctaccgatgataaaattagaattgcagaatatggtgataatgaaaaaggtagggaagctagacgttacagagaaaatttaataaaaaaatatgggggcaaaaaacagcttatatgtgggatccattataatttttcctttgatgatgatttcttgaaaaagttatactgtttatatgaaagacagaacactcataagctttttagtggaatatttaataaaaatcagaaattgggatacaaggagtttaaaaataacttatacttaaaggttacaagaaattacttgaggtataggtggattattatatatcttttaggagcaagtggagttgttgacaaaagctatatgggaccttgtatgaattcatctaaggaaattgcacatgatagtttttcaaatgaaggggctttgtcttatagaaatagtgagtgtggatataagaataaaatagatctatatcctagttataattctgttgatgagcatattgaaagtttaaggagatttgtaagcgataagcttataggaagtcataaagaattatatagctgtgtaaggctaaaaccaaaagatccaagtgatttctttaattctcttggcaaagatggaatccaatatctagaatatagaagtattgatattaatccttttgaaaaaggaggaataagtttagatgatctttattttcttcaaatatttaatttgtttttgctaattaatgaagagacagattatgagagatggcaggaagagggaacagaaaatcaaaatataatttcaaaactaggacaaaaagatgttttattaaagaaagatggagagcttatttcaaaagagcattggggagtagaaatattaaataatataagagatattaatgataaattaaatcttggaaaagaaagaattattgatttaatgattgaaaaaatcaagaataatcaactaacatatgcttacaaaattgaaaaaaaagtaaaagaagaaggatatatcaatgcccatctagatatagcacagaaatataaagaagattcttataaaaacagatttaaattggaaggatatgaagaattagagctatccactcaaatattaatgaaagaagccattaaaagaggaatagaagttgaagttttggataaatctgaaaatttcatatcacttagaaagaataataaagtagagtatattaagcaagcaactaaaacatcaaaagatagttatataactgctttaattatggagaataagagtgtaactaaaaaggttctttctgatagtggcattaaagttccaaaaggaattgaggtaaattcaatagatgagtcttttaatatagtaaaagaatttactaaaaagccagttgttattaaaccaaaatcaacaaattttgggataggcataagcatatttaaagaaggtgccgatgaagagagtattaaaaaggcttttgaactcgcatttaaatatgataatacagttctcatagaagaatttgttaagggaaaagaatatcgttttttggttatagacggtaaagttgcaggaatacttcatagagttcctgctaatgttaaaggggatggagtaagttctattaaggaactagtggaaataaagaatcaggatccgttaagaggccatcactatgtaacaccacttgaaaagataattttagatgaaagtgcagaattatttttagagcaacaaaataaagattttaattatatcccagaagaaggcgaaattgtttatctaagagaaaattcaaacataagcactggcggagatagtatagattatactgatagtattcctgaaaagtttaaaagaatagctgtaaatgcagccgatgttgtcaacgcaagaatttgtggagttgatatgatgcttgaaaattttaacgacgaaaattctaattactcaataatcgaactaaattttaatcctgcaattcatattcattgctatccttataaaggtacagaaagagaaattggtgtagaaatattaagggtattaaacttcgtttaaaatatataaatataaaaataaaggaagctctcaaaagagctccctttaatataattagctataattatagagattcaacagctaaagctgataatactgcattagttatagttaatccagctgttacagcaattaagctagttggctcaagttgaactgtataagttgtattagcataagctggattgcaatcacaaaattgaaaactaaatgattcagattctaagacactaactgtttcagcgaaagtaaatgttccgccgattggttgaggagctccatcaccaactgtttttattagtgtgaaatttaaatttactaaaatatctacaggtaaagaaattatgctagtaaatgttaaaagcactttaggattacacatattagtagtatctagagaaacactagctacaggtataggtctagataatggtgttgaaattataggcaatggtccaactccaccagaaccaacatttagtaaagctctaccaggctctggagcacggctgtagcatctgcaactaggacgattgtcagaataagtgtagctaggacgagtgtcgtagcaatcgtaatcatgttcattttcacaaataatattcataaattacctccatactatcataagtttatcaagtttttctccgtataatttagttgtaagagattctttttatattatattgtatgagaaacatgtaaaaatgtgatgtattagaaaatctaatattttataaatttttatgagtataatgattaaatgccaaggtatttatattttaggaatatacaaatttaactaataatttaaaagatgaggtgcgactcaatgataaaaaatgattatatgaaagagatagagaatactttaacattaacaaatgaagaagtaagaaaggatatagtaaatggtgatataggagaagctaaagaaaaaataaacaaaaagcttaaggctctcgtaggaatcgatataggaactatagacatattttctttcaacagcatagaaagttttataggtaaagaaacgcattataatgcagaaaaatttatagcatttggaagtcttatgaaacttcaagggcttattagcgataaggaaaataatgaaagcgctaaaattcaatattatgaaaaatcattagaaggtttttataaagcttatactgaagatgatgagataaatgagaaatatctttatgaagcagcagaagtagcggatgaattaattaattatgaactttccttagacttagacaagaaaatctttagaatatatgaactgaccaataagcttgatagagcagaggataccttattttacattcttagaaagactcataatgatggtagcattatcttagaaggaattaaattttacaatagacttaaagaaaaagattacgatgaattaacggaaggtaatcttcctatagaggaagttaaagatggaattttggagcttgaaagaagattaggtttataaatctttgttaaatataactaggtaaattacgtaggtaaaagtacttgctattggtatcataggaacattgctaaaaataaataatataatgataaaaagcaattataatctagaggaaactatggaatttaagggatggaataattttgagaatctagcgagagcatgtggatatagtagttgcggtaaaaatgacaatggagataacatagaggatgagtttgaaaattcagaatgtagagatattccaaacggatttcaagatgtagatccacagctatttattcttataggagagatattaggaaatatattatcaggaaggcttccgttcaatgttcaaaatgcgttaggaaattggttgcagttagttggtcaagtaatagagacatataatgcccaacagcaatacttccaaggaggaccaggaagatactttgatcctaaaaattataatgtaagtaatccgttttgtagcagttcgcaaaacactaattcaagcaaaaataaacctaataaatcaacaaatgatattaagaaaaaaaattcagaagaggacatggatagtaagataaaacatttagaattatctttaaatgatttaagagaagagataaaagcgattaaaaaattactagaaaaataattaaattaaattatttttctagtaatttttctttaactttttttaaatttgttacttgctttgttatagtagagacaaatattactcctaatgccaatgttccagcactagctaatgtatttaatcctaattctactgcacggcttatattgccacttattgtttcgtacattgtgtaatacattccagaaccaggaactagcggaataagcgcacaaattaccaaggtggttacaggagtttttaaaagccttgcacaaatttctgaatatatactaaatagtattgaagatataaacaatgacaagatatcgcctacataattttcttttaaatacagataagaaaaccaacttatagcgccacctatagatgcaaatattaaattctttccttttatattgaaaattattccaaagcctaaggatgctaaaaacgagactgcaatttgtgttagcataaaacctcctaaatattatgataaaaaatgaaatatattttattagctcatgattgtggttagaattaacctaagttatttataaataggcttaaaactgctccagttccaacagctatagaaaccgcaactaaaaatgcttcagaggcttttgttataccagataaaaagtcaccggctatagtatctctaattgcattagtaattgtgagtccaggaacaagaagcataatagaacctataatagttttatctaaattattagataaatttaattttatgaacgctatagctaaaaatgcacataatcctccacttaaagaattagtgaaaaattcgtttatgtttaatttttggcatatcacaacaatgatttttattactgctccaattatgcttgcagaaataaaatccttaagatttccaccaaacataatactaaagcatcctgcactaagagcagaccataataaagtggttaagttagagtacctatggctattggatatgtttgtaagttccttattaaattcattcatattaatagtttctgtttgtatttttctagaaagatcgttaactaaatctactttatgtaaatcaacacctctggaaatgattctttgaacaagagtagcaacctcatcataataagttactgttaccattatccctgtcggtattacaaaactatcaactgtatgagcaccaaaggcagtacatattctactaatagtttcttcgactctataagtttcagcgccactttctagcattatttttccggccaatgtagatactttaagtaatttatttaagtccataattttttctccaatatattttttataacaaatgaattatagcacataataaataattcttataggagtaagttatataatatttaataatgaaagattatatgttatcagaggataagatcattggaagttaagcatattaatatagtagaatgaatctataagataatataaaatataacaaattctactaaaggcaatataaaaatataaaaaatagttgataaatttagtaagaaaacatataatttgaatataagtgaaactcttgtacatattttatactatgttaaagtggtttctcgtgcccgttagggaacaaaaatatattggggtgatttattaagatgaattttgaaaatatacaaagagaagataaagaaatttatgatttaattgagaaagagctagttaggcaacaaaaaggaatagaattaatagcttcagaaaatattgtaagtccagctgttatggaagctatgggttcttatttaactaataaatatgctgagggatatccaaataaaagatactatggaggatgtcacgttgtagatgaaatagaacaaattgcaattgatagagctaaggaattatttggtgcagagcatgctaatgttcaacctcattcaggttcacaagcgaatatggctgtatattttgcagtattagaaccaggagatactgtattaggtatggatttgagccatggtggacacttaactcatggttctccagttaacttttcaggaaaattgtttaactttgtatcttatggagttgataaagaaactgagatgattgactatgaaaatgtaagaaagcttgctattgaacataaaccaaagcttatagttgctggtgcaagtgcatatgcaagaattttggattttccaaagtttagagaaatagctgatgaagttggagcattactaatggtagatatggctcatattgcaggacttgttgctgcaggtgttcatccatcaccagtgccatattctgattttgtaacaacaacaactcataagactttaagaggtccaagaggtgggttaatactttgtaaagagaaatatgctcaagtattaaataaaaacatatttccaggaatacaaggaggtcctttagagcatattatagctgctaaggctgtgtgttttaaagaagcattagatccaagttttaaaacatatggagaaaatgtagttgaaaactgtaaagaacttgcagcacaattaatagctagaggttttaaaattgtatcaggtggaacagataaccatgtcttcttagttgatttaaataacaaagatataacaggaaaagaagctgaagctttattagattcagttggaataactgttaataaaaacacagtacctaatgaaacaagaagtccatttgtaacttcaggaatcagaattggtacagcagcgataacaactagaggttttgtaaaggatgatatggctgaaattgcagaagttatatcagaggcaatagagaatagagatggagatttatcagctcttaaaactagaatagaaactttatgtgataaacatccattatataattaagtaataaggacatagcgaggcttcatttatatgaagcctcttgttatatttatctagaattctaaagagtaaatagaaattattatttttattatcgctattatttatacttaaataagtaattaaatacttaagataataataaaataaattaaggtttagaatttacataagagattgtgaaaatataatatgatttatgtggaagatgaggagatagatgaaaaaagcacttttgattattgatgctcaagaagattttattggtgaacagcgtaataaagagagatttaattttgaagatgtagataatcttattaataatataaataagaaaattatgttttatcagagaaacaaagatatagtaatttatattgctagtgtacttcctaataattttttttataagaagttttttggatatggccttgtaggaactaaaggagccaaattggataagaggattaagatagcatcacaaaattattttgaaaaacaatttgcaagtgcttttagaaatagcaatttagtgaaattcataaaaaagaatgaagtaagtaaaatagaattggttggagttgataataatgaatgtatttttaagactgcaagtagtgcgattaagattggacttaatgttatcatctccagcgatagcataggaattattaataatgaaaaacaccgtaaaataactaacaaattaaagtcaattggagtagcttatatatgaagaaaaactaataaaattaagattaagtttttataaatattttatttaaaaatttctcatgaacatttaaagtatttcagaataatatatattatgaagaaagaaggttttatgggaggaaaaattaatgaatccttatcaattaatcatgaatgttcaacaaagaatgcaacaagatcctgactttgctaataaatttaataaagctgtatctgaattaaacaaggtgccaggacttcagcaaagagttattcaaatagctcaaattagtgatgaaagtcaaagggaacaagctatggaaagattacctaaagatgcaaagcatgcggtaaagagaatcttaggattattagatgagtataatatttataaatgatttaaattagaattatatattttcaagtacttattgaataaaagaagtttcttatagttataagaattttaactataggaaacttctcctattttagataacaagtataagaaatttttagggaaaatttattattaatatgttaatttggctcggaaattaaaatcctcttttttcagcttcaattccactttcatttcttccaggtttttttattgttgtgttgtaactacttttagcatattgattttgagttttgttgccatttcttaaaaaattactttctgaataatctttattattattattgtccacaaaatcatctcctttaacttattatatatatagtatatctacattaagaaaaattaattgtggtaaatttagtatagatattataaaaaataatattctattttataatacttttacaagaaaatattacaaaatagaaattaggacaaataaaacaccccaaaaaaacaaatgcatggaaaatgttatgaatgagcaaatgagaagtcgctgccttgtatttaaagatggttctatacttactcttataagaaaataaaaacctgctaaagtaaagagcgcagaacatatactatcgtaagagagtataaagataagtaaaattaagcctaaaaatataaaattccagccaggcatgtattttacttgtacatatttttcgcctgaatccaagtatgtgccattaatagcaatatcacaattgttatctatacttaccagaatagcggttttacttcctaatttaaatgtagtctcacgtgtaactccaaaagttttagagctttgaagttttacaggaatgttatttactaataatctctttcttaaaaaacttttagaatattctatagtataatttatattatctacattggcaatccatctttgagttcccataaaaacctcctttattaatgaacattaaaattattattatataaatttataatgaaattaagttagtatatttaaatatatacataaatatgtgtgaatagaattgagtttttactttaaaacaaattataagttaaataattaagttaaaaatgactaagccgagaatagttgattcaaaataataggattatcaagaaaaacgttgtataatggtaaagtaatttaaaatcatactagtcatcatatactataatgattaaataaatggtaagacgtcttaaaatttgtaaaataagcctgaataatttgagaaagatatattttgcaataacgaatttacatttgaattttagtatacaaagtatgttgttaatttattaagactagaatggaaataattaatatcagaatgtatatttaagattgattaaaatttaataaaaaatagtataatagatgaaaaatatgaagaaaagataatttgatacgttaaaataaaaaaatatttattaaaataaaattaggtatagaaaataagcaataatgagaaataaatttttattattggattttttatcgacaaggagaaaaaatgagtaaaacattagtattagcagaaaaaccatcagtagggagagatttggcaaaagttcttaagtgtaaccaaaataaaggttcatatatagaaggtagtaaatatatagtgacttgggcaatgggacatttagttgggcttatggatcctgaaggatatgataataaatataaagagtggaaaatggaaacactcccaatgcttccaaaacatatgaaacttacggtgttaaagaagacaggaagacaatataatgaagtaaaaaaacaactattgagaaatgatgttagtgatattgtaatcgctacagatgctggaagggaaggagaactggtagcacgctggatattagaaaagtcaggagttaagaaaccattaaagagattgtggatttcgtctcaaactgaaaaagctattttagacgggtttagaaatttaaagcctggtgaagcttacgagaatctttataaggcagcagtatgtagagcagaagcagattggcttgtgggacttaatgtgacaagagcattaacatgtaaatataatgcacaattatcagcaggaagggttcaatcaccaacactagctatgattgtatcaagggaagaagaaatacgaaattttaaacctaaagcttattatactttagaaggaaaaactaaaggatttactttatcatggattaataaagataataattcaagaatttttgatgaagaatatgcaagtaaagtggcttctaaactaagaaattcagatgggaaaatagttaatgtaagcgaagcaaataagaaaaagttttctcctgccctctatgatttaactgaattacaaagggatgcgaataaaatatggggatattctgcaaaacagacattaaatataatgcaaaggctttatgaaaattataaaatattaacttatccaagaacagattctagatatattacaacagatattgtagctactattcctgaaagattgaaggcaatatctattggtgaatatagaactgcggcagaagaactacttaggagtaaaataaatggtcataaaggatttgtagataattccaaggtaagtgatcaccatgctattatcccaacagaagaaaaacctaatttatcagctttatcatctgaagagagaaaaatctatgacttagcagtcaaaaggtttttaagtgttatgcttccaccgtttgaatatattcaaactacagtagaagcagaggttgaaggggaaaagcttgttgcgaaaggaaaagttattaaggccaaaggttggaaaaagctttatgataaattagaggaagataatgatgatgaagaaataaaagagcaagtgcttcccacagtatccaaaggggatagtattaaggtagatagtgttaatataaagaaaggtgaaacaaaaccacctgctagatttacagaggctacacttttatcagctatggagaatcctcataaatatataaacgttagtaaagaagctgcaaaaactttaggtgagactggtggacttggtacagttgctactagagcagatattattgaaaagttatttaattcttttgttatagaaaaaagaggtaaggaaataattcctacgtcaaaaggaaaacaattgatagaactcgttccaaaggatttgaaatcgccacttttaacagccaaatgggagagtcagttagatgaaatagctaaaggaaaaagagatgatcactcatttgtaaaagaaatgaaaaattattcagttgcattagttgaagatgttaaatgtacaaatagtaaattcgttcatgataataaaaccggaaagaagtgtcctaactgcggcaaatatttgttagaagtcaaaggaaagaatgggataatgaatgtttgtcaggacagagagtgcggttatagggaaagtgtggctagagtaactaatgctagatgtcctgagtgcaagaagaaactagagctaagaggaaatggtgagggagcaatatacgtatgccctggcagtaactgcaattttagagaaaaagcttctcaatttaagaagagatttgagaaaaatggaaagattgataaaagagaagtgaataattatatgaagaaaatgaagaaagaagcagaagaatttaatgataatccttttgctgcattattaggcgatataaaatttgataaatagtaaaaaacttctagtaatttaaagttactagaagttttttattaaatatatttataccctttatttcggtagttatgcataagttaaaaatattgtcatattgttaagaaaattagaattacttgttatattatttcttcttatggtaacactaattctgaaaggaggcagtaactatgaaaaataatgcaaaaagaattatatcttttactttgatatttatttttactttattacttttaccaattaacttagccaaagctgtagatacggatgaaaaagtaaaatcagatggaactaatattgaagcaagatcagctttattaatggaaccaatgagcggcaaaatactttatgaaaagaatgcagatgaaaaatttgcaccagcatctgtaacaaaaattatgactatgttgataacaatggagggcgtagatagcggaaaaattaaattagatgataaagtaacttgtagtgaaaatgctaagaaaatgggcggaagtacaatgcttttagacactggagaaataagaactgttgaagaacttttgaaaggtgtagcgatagcttctggaaatgatgcggcagttgcacttgcagaatatcttggaggtacagagcaagattttgttaatatgatgaacaaaagagcgcaggaacttggaatggttaatacaacattcaaaaactgtaatggattaccagcagatggacatatgtctactgcaaaagatatagcaataatgtcaaaagagttattgaaacatccaaaggttttaaaatatacaggaacttatatggataatatatcagaaggaagaaaatctccaatagaactagtaaaccacaacaaattagttagattttttgaaggttgtgacgggttaaaaactggatttacggatgaagctaaatactgcattagcgctacagcaacaagaaatggagtaagaatgctatctgtaataatgggagcaccaacttataaaataagaaatcgtgatgcaggtgttttacttaattatggattttcaaagtatgaaggcaaaaagcttgtatctaaagatgaagaaatagataaagtatatatggatgaacaaacagataagttctttatggcaatggctaaagatgacttaaatgtcatacttcctaagggtgacaataaggatttagagaaaaaaattgttatagatgagctaaaaaaagaatacaaagcaggagatatagttggaaaatgtgaagtttatttgggtagcgaaaaagtaggagaggtagatatatattgcgatagagatgtcaagaaaggcaatataattgacaatataaaatataatattaaaaacttattcgaaaaaggtgtatagcctcaataaaaaaatattatgaattttatatttttcttgtaaaactataaataagaaataattcaagcatagttgaagaataaatttaattaaatttatttagctatgcttgttttgtatttttatgatatgtatatttttaataagtctctatatattgctgctaaatgaaatgtttaacttactaaaatttcaagcgtaaatttgttattcaaagtatatatattgcagaaataattcttcattataattctaaaaatattgcaagaattttagccgtaattatgaattatgaaatgtgcattgtaaattgcaacatatatataaattaatgattcttgttttaggtgttattacttgttattatatattatagtacttattatttagatttaaagttataatttaagtataattcataatggaggtaaaaaagatatatatggaacttccaaagattaaaattaatgattttgaaggcccgtttgatcttctattacatttaataagaaagaatcaaatgagtatatataatgtgaagatatatgaaataactaatcagtatctgaattatattaatgaaatgaaaaagatggatttagaaataacttctgagtttattgtagtagcggctaccttaatagaaattaaatcaaagaatttgttgccgaagcttaaaaaacaagaagatgatgaagaagatgatgagaaaaagcttttagaaaaacttattctttataggaaaataaaaggggtttcagtatttttaaaagacagatatactagtgctggcgagatatatggaaagaaaccagaggtaatagaagaaaaaagagatgatactgataaaaaagatttattaaaaaatataagtcttatagaattgtttaatatatataataatttacttgagatatacaataataagcaaaatagaaataacataattcagaaaaaaatatatgtggataaatataaaatagaagataagttagaatatattatggacaagttaaaaacagagaaggtaagtagctttcacaagattatcgaaaattgtgaatgcaaattagagtgtgttgtgacatttttggcattgctagagatgattaaacagaggatgatcaaagtatatcaaagcgaaaattttagcaatatattgattgaaaggagaacagatgatgagtgatgataaagggattcaaattccatttatagatgacaagaaaaaaaattctttaaaatccgcaatagaatctttgttatttgctagtggagaaccattgagtttacaggatttggttaaccatcttgaagaaaaaaataaacttattgaaattatcatccatgaaatgatggaagaatacgaaaataataatagaggaataaaaataatatgtattaaaggaagttaccagttagttacgaaagctgaaaactcagattatatacagaagcttttaaagaaaaacaaaagacaatctttatcccaagcatctatagagagtttagccataattgcttataagcagcctataacaagaattgatattgacgaaattagaggcgttaaatcagagagtgctcttcaaagacttttagaaaaagatcttataaaagaggtcggcagactagaagtgcctggtagaccaatcttatatggaacaacagatgaatttttaagacaatttgaattgaaagatttaaaggaacttccttctttagatttatttgggcaagaagatgttcaggaagatcatggacaggaataaaatttaaggatatattatcggaagttataaatatattaatatttgaaatttaaaaaaacaataaaatttatttttagatttcttgcatttattttattaaatttaagagagaaatagtgcattattgaacaactacttctctcttgaattaaaaattaggagcaatttaaatattatcgctatcactgcaataacattcttcggaattattatcaacagtagtagtattgacagtagcagattttttattctttccacatatatcttttactaaactttttacaatatctaatatttgaggaactgtatctacaattctatcatatgtagtatcttgatctacaggtagcattctaacaccatcttgtttaacaactaggaatgctacaggtttaacagaaacccctgctccagagccgcctccaaaaggaaatgttgtacttgtgatattttgctttaaatttagacattcacttccaccagaagcaaatccaaagcttaatcttgaaactggaacgatataagttccgtcttttgtttctatagctttccctattactgtgtttacatcaatcatatccttaagattttccatagtacttttcattaagttttcgacatgttgttcacttgacataataaatcccctttactaaggggtcacctcccttgtttctcattgttttttaataaattaattattatatatataatgtttgcaagtgataagaaaattatacttgaagtttcaatttttagtaaaaatttatccgcaaatagaggggttattttaaaattaaatctctttatattaaaaatgtaattaaggagaatataagttaatgatgttgtattatatataattccatagaaaattgcagttcttgcagcatcgtttagggaatattccaaggacaaatttatttttaacagtggcttgtattttaaactatttaaagttgaaatcagatgcttgaaatttattttactattaatttttgaaaaaaatttatgcttatttttaattaaaggcgaatttttgagtttttttatacgtgtcgctcttttcttatttttagagataagattaaatccatataattttatataataatctattgtagaatagtaaatactaaatttaatagggataggaataaaaaatattaataagaccactaaaaagacataaaataatttcataaaattcctccaaactatatctacttcataattattgactaataataaaaaaataaacctagaaaattatcaaaattaggtttaaaaaataattttaaaggtaaactagaaccaaatagtaagtttagaaggtgattaattatgcgaaaaggtactggtaaatgcacttcattgatagcactaattcttatatgtactcaaataatatgtatagatgcaaatgctaaaagtaaatctaataatttaagagtaaatgctagatctgcgattgcattggataaggaaagtcatgcagttttatttgaacaaaatgcttatgagatagttccaatggcaagtacaacaaagatacttacttctttaatagctattgaacaaggtaatttagataaaaaagtagtaataagcaaaaaagcagctagtataagaggatctacagttggttataaagaaaacgaagaaattactttaagagagctagtttttgggctaatgtttaagtcaggaaatgatgcagcaatagctattgccgaggaattagggggatcaatagaaggatttgcagaaataatgaatcattatgctaggggtataggaatattagattcacattttgagtctcctcatggattggatagtagtaaacattattcttcagcatatgatttagcgatacttactgctaagggtatggattacgatttatttagagaagtagtaggaagtaaacaaatctcaaaggaaaagtataattttactagagattataataacataaataaaatattgtggagaattccaggagctaatggtgttaaaacaggatatacaggccaagcaggtaagtgtttagtttcatcaattaataataatggcaaagatgttatcattgtggttctaaattgtccagatagatggaatgtgacagaaaaaatatataattatgtattagaaaaagtggcatttggaaatcatacagttaaagaattggtttagtaagcaatagtagatagttttttattactatctacttttttttattgtctaggaaagtatagaattttttgattttgaaagtcagtgataccaatggttataaggatattggcttgtaaaaagtggtatcaagaaagagcgtggcgcagccactttgttcttaaataaagcatttcagagaatcaaagataagtaatctgagtattaaaatatagattaaaatattgcaaaataaataattttaaacaattatatttgtgtcaaattagatattttaaaataatttatattagaagcaattttatctaaaggagaaaaaatggtaaaagaggctattgattgtatagatgcgggaacggagtattgtccatgtaaacttgcagagtatgggcagtgtttgacctgctcccaatgtcaaggcgaagttttttgcgattgtttaaattggaagggggtttgtatatatcaagaactccataataatggaaataaagcaaaagaaggccgtaaaacttttgaatgtagcgtggtagaggtacaaaattataatgataaattagtgataattaaatttagagctcctcataaattagttatagatttagtgaaacctggaagctatgtatttataagaactgatggaaataattattttgatgttccaatatctataatgaattcagatatagagaatgacactataatggttgctgttgaaatcaggggggttaaaactgctaagttgctggatataaaaacaggtgggaacatagtaatacgtggaccttactggaatggtgtttttggaattaaaaatatattggctcaaaagaataataaaacattagtacttgcaagaggcattggattagctcctatgatacctgtaataagaaaattaatttcacaaaacaatgatatacaaatagtaatagataaagctccatttgaagaaaatttttctaaagaacttttggatgaatataaaatggaggtatcagagtgttcactactggataagggcaagctatcagatcatgcaaaagtgctgattaatgattcaattaaaggtggaactaattttattcatgtagcaggagctgatattttgacctatggtgttattaactatctaagcgacattaatagaaatgatgtctcactttcatgttgtaataattttaagatgtgctgtggtgaagggatttgtggggcatgtacatcaagattttcaggtcacagagtaaaaagattctgtaaagaacaggctgacccgagaagtatttttgaagggagaagatttatatgaaggttattattgttggcggaggttggtctggatgcgcagcagcaatttcaagtaaaaaggctggagcagatgttactatcatagaaaagacagatttgttacttggacttggtaatgtaggtggaataatgcgtaataatggcagatatactgctgcagaagaattaatagcccttggtggaggcgatctggttaaaatcacagatgagatttcaactcacaaaaatatagattttcctggacataaacatgctacactttataatgtcaatttaatagagggagttgttagcaaatacttgaagtcattggatataaatctaatgatggagagtagagttaatgatatcaattttgatggacaaaaaataaaaggtgtttaccttagcgatggaacgtatatagaaggtgacgtatttatagaaacaacaggaactactgggcctatggggaattgcttgcgttatggaaatggctgctcaatgtgtgttttaaggtgccctgcttttgggcctagaataagtattagtgaaagatgtggagtttccgatattcagggtgaaagaggagatgatatcttaggagcattctctggctcttgtaaattggctaaagaaagtttgtcagatgaaataagaaatgagttagattccaaaggtgttgtaattttaaaagttcctaaggaagatataaattatgataaattaagtacaaaagtatgccaacaatatgcgctcaaagaatttgctgagaatattatacttttagatactggacatgcaaagctaatgacaacttactatccattatacaaactaaggaaaataaaaggattagaaaatgctaaatatgttgatccatacgcaggaagtaaaggaaactcaattaggtatttatcagttgcaccaagaactaatgacttaaaggtaattggagtagataatttgttctgtgcaggtgagaaaagtggattatttgttgggcatacagaagcaatgtgtactggtgctttagctggacacaatgcagtaagattagctatgggaatgccgcttttgatacttccttcatctatagcaattggagatatgataacttatgcaaatgaaaaggctagtactagagaaggaagaaaagatagatatactttcgcaggttcggtatattttaataggatgaaagagttggggttatatacaatagatgtagatgaaattataaaaagaatcaaaaaagtaaatttagataatatttttagtcaaaaattattataataatttttataaataagaaaatcttataaagatttaaaagacatggtatttaaagtcatgtcttttatttttacaaagaagtgtacattaagaattaatttaaataattgagaaaatttacgctataaattggcattaattaaactttagttaattagaaagataaatgaaataaggtttggctttttaacaccaatcatatgattgtacataacatatagtatataaaaactgaggaggaattagagatgagcaacaataataattgcgatattgcttatggtcgtcattatagaggaaaccaacttggtgataattattataggtatagggatcataatcatgaatttgtatcaagcacaaattatgcagaagatgagaagtgtgaagaacacaaccatcgtattgctgggactactggtccagcaataagggttggattatctcatgttcatagaattgaagaagtcacagacacatttaatgatcataatcatagagtttgcattacaactggtccagcgatttatatttcacgaaataagcatattcatatagttcaagggcaaacatcattcaatgatgggcatgatcacgattatttttttacgactctaattgatgatccatctaatgtaccagatagaaattaaccataaattaagatatttttatttgcatatattattgactaaacaaatgtgaatcgtcatagctattaaccacactttagtataaatagggtgtggttaattagttttcttattttttcgaaaagacagatacgtaaaaaaatctacacatataaaaagagtgcgaagcacaatacggaacttatataaaaagagtgcgaagcacaatacggaatttatataaaaagagtgcgaagtacaatatggaatttaaccaaagtttcttgcaattttgctcttagacaaaatagaggaaattcatataaatttgttaagtaaaagttatattttttgataataaatcagaaggatatttataatattttaaaattatatggaagcagaaaaaagttttaataaattatcaataatattaacctaaacattaaattaatttaaaaatattagtttgaattgttaaaagaatgattgtattctagacaagaatatgttttagatgacataaatatatttaaatatttaaatatagcataaaagtatatcaaaattgcaaataataaataaaaatactattcattctatttgaatatgctaagtatttaaaattaaggagtaataaaaatggcaaagaataacaaacaaaagaaattaacattaattacacttattctgatgatctttacatcagttttcggatttgctaatatgccaagatctttttatcttatgggttatggtgcaattccctggtttatattgggaggaataacatatttcataccatttgcattcatgatggcagaatatggatctgcatttaaagatgaaaaaggcggtatatactcatggatggaaaagtctgtagggcctaagtttgcctttgtaggagttttcatgtggtattcttcttatgtagtatggatgataaatatatgttctactatttggattccattatcaaatacaatatttggaatagacactacatcaaattggggaatacttggattgaattcaactcaggttttaggtgtacttggtgttatgtgggtgtctgcaacatattttatatcaaaaagagggataagcaaaataactaagattacatcagttggaggaatagcggtagcgctcctaaacatagttttaatagtgggcgcaattataatatctatattaaacaagggacaatttaaagaggaaattgcatctacaatgtcttttgttaattcaccaaatccagcttaccagaatgttagttcagttttatcattcctagtttttgctttatttgcatatggtggtatcgaagctgtgagtggtcttgttgatcaaactgaaaatccagagaagacatttcctaaggggattttaatagcagcagctataatttctgttggttattctcttggaattttcttgattggaatatttacaaactgggcaggcactctttcgggtgaaaacatcaatatggcaaacgttgcatatgttgttatgaataatttaggatataccttgggcagctcaatgggattaagtaattcgttatctatacaagttggaaattgggtagctaggttcgttggattatcaatgtttttggcattaacaggagcatttttcacactatcatattctccgcttaaacagttaatagaaggaacaccagcaaaactttggccaggaaagatggctgttattgatgaaaacgagatgccaataaatgcaatgtttattcaaacaattatagtagcagtaatggtgctatttgtttctatgggaggaagcagtgcaaaattatttttcacaatgttagtattaatgactaatgttgcgatgactataccatatttatttttatcaagtgcatatatatcatttagaaaaaaggataatatagagaagccttttataatattaaaaagtaaatcatttgctatatttataggagttatagttacggcagtggttggattcgcaaatttctttacaattatcgagccagcaattcatggtgattacaaatctacaattgctatgattgcgggacctgtagtttttgctgtagcagcattattaatctatgctaacggagagaagaaaaaagatatttagaaaattgtttgtacataataaaaataactaggggttataatctctagttatttttatttgtacaaataattttcgattacattatatatattaaggaaaaaataagaaatgttaaacaattattaattgaaaaagtaagaaatgagttttataattcaagtgtactatatgaattagtacacttaatacaattaggagggaagctcatgaaaaaatcaacgataattattatgtgtggaattgtcatcatagttactgcttttcttgggatggataataataaaatgtatcaaaagcagaagaattttgaaactataaatgaagttctagatcaactaaatgataaaccgttaaaagcaattgatgaaacaggaaagttcactgaaacaaatgagtttaaagaatgtttttcagaacgaaaaaggataactaatattgattttaatttctcaaaggtaaaaatagaaaaagtatataatcttagcgaaaaagataaaaatgaaatgctaagtgaatatgatggatttagaaataatttttctaaaagacgtccgataacaagagaggaaccaataagtttaattgttgatgcatataatcacagatatccagagggaaaagatgatagaccacaaaagctaaaagttaacttggtcatgatagatgagggagaaggtttagtaattgattatattacgtgtcattcttatgtagaaggtaaagacaatgattagaattgatcctaggagtagtactcctatttatgaacaaatagaacttgggataaaggaacttattctaaaaggagctttaaagatgggcgagaaattaccatcagttagagagttggcatcaatacttatgataaaccctaatacaataagcaaagcctatggtgaactcgaaagagaaggtataattgaaactttaaggggaaaaggaacttttataacatctaattatgaaggtaagggggatcataaaaaaatggagaacatttcaaatgaattaaaaaaaattatacttgaggcaagttatgggggcattagtaaagaagaatttataaagttagcgcttcaaatattttctgagttaggggtggatgataatgatagaagtgaataatttatcattcgagattgatggaaggcagattttggaaaatataaatatcagaatagataaaaataaaatatttggaattattgggccaaatggtgttgggaaaactacacttttaagatgtttaacaggaatttataaaggaacatcaggaaatgtattttatgatggtcaagatgtttatgataatatagatgttaaaaataagattggctatgtagcagatgagaatatcatgcaaacaaattttaaagttagcgaaatactgaagtactataaatattcatataaaaattttgatgaaaagaaatttaatgaattaaataaaatttttaaaattcaaactaataagtatatattccaattatctaaagggatgaaaatgagactttccataatgctagctttttctattcatgctgaatatttaatattagatgaaccaacatcaggactagatgcaatactaaagaataaattattaaagatatttgcagatgaagtttttgaaaatggtacaactataataataagttctcatcatttaaatgaacttgagagaatttgtgatgatgtagctattttagataaaggcatagttacatatgaaaattctgtggaaaatatgaagaataagataaaaaagatacaagtggcttttgatgagcctgtttatgaagatgacttaaaacttaagggaatatttaaaattagtagagttggcagagtttttaccataataactgatgaatatgacggggaatttataaaaagtttagaaaaattcaaaccgttgtttattgaagaaatagatctaagcttggaagatatctttatctataaagttgataaggaggataatgatgaaaaaatatttaaataaaggattgttatatgcatggttcaattctgctaaggcagctatctttataggattattagtatggggagctgtagcatatgaaatcataaagaacaatttaaatgatgtcagaaatggacttgcaaacaattttgataattactattatacgaatgtttggcacgaatatttcatgctagcaattatatttgtagccatatattttatagcaaagggaattaataagagaaatactgaaatgttcttatgcagtggaccatatacaaaaaagcagattagatataatgaattcatatgtcttttaattacattaatactttttgttataatgtatgtttatatagcgatagtatcatatttcggtaatgctgaatttatatcggttgttgaagggtattggagtatagttattatagaaacttcaaaaataaccttacttggaattattggtataatgtttatgttaataatagatttgatgttttctaattcagtaataggatttattagcatgatttctgtaatacctgtatctatttctataataatagctaaggttatttccatacttgagtattttggagttaataaggattatagtttattggataaaataagaggtgtaggttataaaaataaattaggaagaggcttttgggagtttgtatttgatagaattagcgttaaagatataatgattgggaatttatggagtgagatggtaagtattttatttatcattataattatgattattatttacagtgtagttcaaaataaatataaactagagaatgctaataagatcttttcatcacaaaataacgaaaagattttagtaacactagtatcaacagcagttggatcatttgcatcattatttttgactgaaagttttattcatagtttgcagctaaagaatggaagttctagagcattaatagggtcagacttagtcaagggtcttggactagatataatatgcatatttctaattggatttatagcctacaaggtaatgaaaagaatattaaaaaatatagtttaggcgataaaaataatttttgataaacaaaatatttatagattttaatttagtgagaaccatatgcagtgcggatatttgtagatggttctcatattttatttaaatcataaagaacaaaaaatatatgtatcgaatagaatatattaacaaaagaataggagatgatcaacatgtctaaacattctaatgattgttgctgctgtaaatgtaattcttgttgctcttgcaaacctagttgctgtaacgtttgcggatgcggcggcggctgcggaggatacggtggttacggtggatatggcggcggcttcggaggctacggcggctttggaggcggatgtggctttggtggctgcggaagctggctttggattttattaattttattccttggtggcggagcaggttgcggaggatttctctggtaatttgattaatcataaggagtacaatttaaaagtagccttataattagatgatagaaacgctggtgacagcgtttctattattttatattcaaataaaaataattagaaagttgtattatataagtgaaaaagatataatctaaaatgtaaaagtataaatgtatttatatgctaaatggagtgatttaaattatggaagaaagattgcagaaatatctcgcaaattgtggagtggcttcaagaagaaaatgtgaggaattaataatttcaggtaaagttaaagtaaatggggttatagttaatgaagtaggaataaaaatagatccattaaaagatatgatagaatataatggaaaggaaataaaaaagaaagaagataaagtttatataatgcttaataagcctgaggggtatattagctcagttaaagacgaaaaaggcagagctactattttggatatagttaaggtgaatgagagaatctatccaattggaagattagattatgatagctcgggattattattattaacaaatgatggagaaatttataataaaataattcatccaagggtagaaataataaaaaggtatgtggcagtagttaagggagaggtaactgataaagataagatgaagtttgaaataggtatagatatcggagggtatattactgcgccagctgagcttaaagttattagttatgataaaggagtttcgactattgagattggtattcatgagggaaagaatagacaaataagaaaaatgtgtgctgctatacaccatgatgtattatctttaaaaagaatatctataggagaaataaaactaggatatttaaaaagaggggaatatagaaaattaaacaaagaagaactagattatatcaatagtttatagataataattaaattataaagaacagatgaaagaatgttgatcatacatcattaataaattaaagcaagatattgattttaataatataatgcgtaatgaaagtagcttgataaaatattgcaaatttttaatatgcgctgtgaaaaacaagttatttgttgaatatttagaaataagatgatagaattaagataatattattcaatgttgtaacaggaaggcaaaagatggatgaagtaaataacgaaaatagtaaagatttaatgagattaattcagggaaaatttataaggttaagtaaaggtcaaaaattaatagctgagtacatattaaaaaattatgataaagcagcatttatgacggcagccaaactaggaatatctgttggagtttctgaatcaacagttgtaagatttgcgattgagcttggcttttcaggatatcctaaattgcaaaaagcactacaagaacttataaagaataagctaacaactgtacagagattagagcttagaaatgattatttttctgatggagatgcattaaaaggtgtactaaaagctgatatggaaaacatacgtgcaactcttgaaaaaattaatcaaaatacgtttgaagatgtagtaaaggggatttttgaggcaaatagaatatacataattggtcttagaagttctactgctcttgcggagtttttagggttttatctaaatataatactgcaaaatgttaaaattgtaagttatggaatttcagatgtatttgaacaaatgataaatgtaggggatggagatttagttataggaattggttttcctagatatgcagctaaaactattgatgcattagaattttcacaagatagaggagccaaagtggttgcgctcacggatagtttactatcacctcttgcgtctaaagctgatcacacattaattgcacaaagtaatatggcatcatttgtagattctttagttgcacctatgtcagtaataaatgcactaattattgcagtaggaatgcgagagaaggaaaatatatctgatattttcggtaatttagaacaaatatggcagacatataatgtttattcttataataatagaaatgttgcagatgactaaaattctagtaaatagagctgttctcagaatgattatgagggcagcttgtttttattaaataaagataaatttattttaatgagaatgataagtttagaggtgaaatattgaataaaaatatagagatgcctaaaaatgttacattaatcattgataggttattagaaaatggatatgaggcttatatggttggaggatgtgttagagattgtattctaggaaaagaacctaaagactgggatataacaactaatgctaagccactagaagtagtggaattatttgataaagttatattaactggattaaagcatggaacagttacagtaatgctaaataaagagagttatgaaattacaacttataggtcagatggtgaatatgaagataatagacatcctaaagaagttaagtttgtgagttctttaaaggaagatttggcgagaagagattttacaattaattcaatggcatataatgatataagtggattagtagattattttaatggcgtagaggatttaggtaaaaagataataagaactgtaggtgaccctagaaaaagatttgatgaggatgccctaagaatgcttagggcaattaggttttctgcccaactagattttactattgataggttaacactaaattcaataaaagaacttaaagataatataagaaatatatcaaaagagagagtcagagaagagtttaataagatattacttaataatccaagaaaaatagaaatattgagggaatgtggaattttagaatacatagttccgggaataagcaaaatctataattttaataaaaacaattcttgccattcacatgatttatataatcataccattatagcaactgaaactgtagaatcccaaatatatttgagattgagtatgctatttcacgattttggaaaagcgtgcataataagaactcatgaaaatgacaatttgcattacagttcttattcaaaagaatcctcaagaatagccaatgaaatattgaaatatttgaaatatgacaataatataattaataaagttacacttcttatacaatatcatgattatagaatggataataaagtatctataaaaaagctactgagagaaatagatatagatctttttaaagatctaattaaaattcagcgagcggatatacttgctcaggattctaaatactctgaaaagcatttaataaatttagatgaggccgaaaatattcttaatgagataattcataacgatgaatgttttaatttaaagaatttgaaaataaatggtggagatttattgtctttaggatttaacaaaggaaaagaaattggtgaaatgctaaattatttattggatattgtaattgaaaatcctaaattaaatgagaaacgggaactagttaaattagttatgaaacgatggagataaaatttattaatatagaatatgttaataatcaaaaggtataaattcaaattaagcgctgctcattttgaatttataccttttattttaagtcttttaatttgtgtatataaatatttaagtttttatttgattaaatttatataataaatttaattaatgagagaataattgcgtaattgtattttgtagaaaaaatggatataattataatgaaacttgagaaaatttttacatttaagaaaaatttaaggtagggataggattatgatagatttaatattttcgaacgtacaagaagcttcaaagttcacaaataataatactaataagggatttgtattattttcaaatgtagaaaatgttgtagaattatccaaattagtatctgaaaatgttatactttgctctacgtctggagagtatggaagaaatggttatgaagatgggattatctctggattccagtatgagctttgtgatggtgaagttgtagagataatttatccaccaataaaaagcataaataacttaaaaagggcttatgaaaaaataagaaataatgagaacgcttttgcacttttattatgtgatggtttagctggaatggaagaaagcattataggtaccctctattttgcagatgataattttaaagtcataggtggaagtgctggagataatcttaaatttaaagaaacatttatattcataggagagaaacgtgtcaatagtgcagtaatattcttcaacataaaaagaagaactagtataattaaggaaaatatatatacaccaatagggcaaaggctattagtgactgaagccgatccaataagtagaacaataaagacattcaataaagttccagccagtactgaatatgcaagagttttaaacataaaagaaagcgaccttcctaattattttataaataatcctttagggaaaatatatgaagatgaaatttttatatcttctcctatgaaagtaaatgctgataaatcaattacattttatagccaagttatgtcaagtacttttgtagaagttctaaagcctgtagatccaataagtcaaataaaagatacagttagaaaagtcggatttaaacctagctttatactatcaattcactgtatattaagaagtttaaaatttcaacaagataatatttggaaagcaatagataaagaaatcctttcattttgccctagtactaccgggtttgtaagctatggagaacaattttataaaaaacatgtaaatcaaactatggtaatattagcagttgaataaagggggatattaatatgtttaaatttaaaagtaaagaaataagcactatacaaagtcaaaatgaagttaaccgtaatgataaagaagaatgcttactatatgtgaatgaagttatggagttaacatctataatagaaaataatataagaacagttattaatgaagaagaaaatgtgacatacggattagataggcttcttaaaggagctgaatatacgactaaccaaacagaaaatgttaatgagtatttacaagttttatctaataatagcgacaagacagaaagtcttgtgcgaggtgttttctttagtcttgataattctaaaaaagaaatagataatgcaagaaatgattttaatgaattaatcaatcaggtcggtatagtctctaaggtttttgatgaatttatcagtttaatttcagagatacaaaatcagtataacagcattcaagggtttgctaatattataaatggaattgcccagcaaacaaatttattgtcattgaatgcagctattgaggcagctagagttggtgaagctggaaaaggttttactgttgtagctaatgaaatcaaaaaactttctgttgatactcagaaaaatgctaaagatattatgaattccttagatgatttaacaaaatcaatggagcaattatctgggaaatccaatgaaggaactgaagttataaataaaacaactaatattattgaaggatcttcttctatactagataaaatagtagatgctgaatcagaagtatataaacatgtacaaggagttcaggactcccaaaagaataatttacatggaataaaggagatatcattaaatttaactaatttagttgagaaatcaagaaccgaaaatcaacaattacaaaacatagtatacagcatacagaaaaaaggggattgttacctagacatacttaattacataaatcaaattaaaattcttaaaaaggaataaatcttgtataaaatatttttacatagtgagtaaactaaagagtataaaataataaaagatgagtttagtagaactcatcttttattattttaaatacatataaatgattttataagggttaaaatattcaaagattagtgatataattgttctgttagaaaattgtggtacaatatcattatcagtggtaaagattagataatgcttaagactttaatattaaggagaaaacataatggagaatgttattaattatatggaaatatgggttaaggagtatatggaaatcttgttagccaaaacagatggatgtaaatgcgataaatgtaaaagggacatcttcacactttctcttaacaatttaaaaccttactatgtggcaacacccttaggaaagataatggccaaaatagaaagtactaaacaacaagttgaaactgatataatagtacaagttacaacagcgataaataaggttagtaataaccctaatcatgatagataaacgtttcaggaaaatattactactgatattcagaagaccataaaatatcgtttagaagaacaactttattttatggttttggtggttctaccagtttccactagagccaccaccaccagaagaaccaccgccgaagccaccaaaacctcctccagatgatccacctctgggaccatggcctctaaaaatattattccagaaaataatctgaagtagtgaaaaagaaatcctacctctattaaagataatatctagcaatagcaggcctagcattatacttccaaacactttagttcctgtattagacttaatagtatttgtatttttttccgagatgtttagtgatttatctagagtaacattatattcttttgctatatgatcgcagaaagtactataagaattaagtaatccttcaccatattttccttctataaaactaggtttggcaactgattccataattctgctgcttaaaacgtctggaatagcaccttcaagtccacggccaacttcaactctccacgcccgatcatttagtgctaaaagaatcaataagccgttatctttacctttttctccgattccccatgacctaaaaagagtgttagcataatcttcaataggtacattattagttgaatttataataactacaacagcttgcgcgccagttttgtcttctaattcctttcctatagatagtaacccattcatctcagtttcgctaattatatgtacataatcatttaaatatttgtaaggtgtaggagaaggaactttaatttcagcacttgctgaaaggaggaaaattgaagaaacaactaaaagaagaaagcttaataataattttaaagatttatgcattaatttttctatcattttgtaaagtctactgaaggaacttcttttgaaccttcgctagctttatagagcggtttttcttggaaaccaaataatgaagatactatattacttggaaaacttcttcttttagtattataatttgttacagcagtattgtaatcttgcctcgctattgcaattctattttctgttccttccaactggactgatagatctctgaaattctgattagactttagttcaggataattttccactatagccaataatctcgaaagagaaccagaaagttgattgtcagcatcagcctgttcctgtatatttgttgccccagataacctgcttcttgcattggcgatatcagtaaatatggatttctcttgtgtagcatagcccttaactgtactaactaaattagggattaaatccgatcttctttgcaattgagtgtcaatgtttgaagatgcagaattggcagtctgttctaaagaaactagattattataactacttataggaatacctattactatcaagattattaccacaattattgctatttttgtactttttcgcattaaaaagcctcccttctaaattaattatattatgtgcagaaatataaattttatatagttaactaaccatataacaaaatttcaactaataattcaaaattacaagtagctttggattagtaattttgaattaaataagaagaatacttatgatgctaaaacttaagtatcataacgataaacgaatttattcaattaatgaatcattatgaagtttaaggatatagtgaaataattatgctaatatgttaaaatataataaatttataattaggagattaaaaatggtctatgttttagagaatgatatattacaaagtgataaaattgaaaatattacaacaaataataataaattatttgttgttgtcattaaatttgatgaacttaaatcaatttcggatatcctcaatataaacgaaaaattattatatgattgtataaatggaagaacatctaaatttgaaagttatgaaggtctagattacatatctttaaagattcctttaattaataatgtattaaaacaatcaaaaaaaataagtatgtttcttcagaaaaatgtacttgtatttataagtgatggaaatgatattatagaagaggtaatttctaagagtaaaacgggtgagattaaaggcttgaatcttagtaagcttttatatgcattttttgataaacttacatttgaggacacttatcatattgaagaacttgaatatgaaattgcagcacttgaagaaggcttaataacttcaaagaatgataattacttaaagaagattattatgttgagaaaaaaattattaaaattaaagaggtattatgaaagattattaaatattgcagaatctatagaagaaaatgataatggattagttgataaaaaaataataagatactttagaatgttcactaatcgtattaatagactatatcagaatgtgaataatcttagagattatgttacccaagtaagggaagcatatcaagctcaagttgacataaatcaaaatcaattaatgaagttattcacagtggtcacgactatatttttgccacttactcttatagtagggtggtatggaatgaattttaatatgccggaatatggctggagttatggatatccatttgtgatttcaataagtatcagcgtagttgtgttatgtggcgtgtggtttaagaaaaataagtggttataaaaataatacctcataattttataaataagaaattatgaggtattagcattaaaatggaattagattattttttgaattttacaaaataaagaatgatgcggcaactattaaatagacagcaaggagttgaactccttctaaccaatttgattctccatcgttggaaactctattagctattaatacagcaactataaggccaatcagttcaaattcattgaaaacaatactcataggagtgaataataagcttaagaatattaatactggtgctacaaataatataatttgcaagcttgagccaatagctatctccaaagcaacatccattttattcttcattgccattacaacagaagtactatgttcagcggcatttcctataataggaattaaaataataccaacgaaaaattcactgagtcctaagcttgaagttatagattctattccacttaccaagaattcactttctatagccactagaacagtagcaatgactaatatagagattgctttctttaatgtccatttagcactaccttcctcttggttagaaactgtataaatatctttgtgagtgaagaatgaaaaaataagacttaaaatgtaaatagaaagcattactattgcaactattatacttaatccttcatacctagtattcaaaagagttgggtccacagtatgggtgaataaagcaggtacacacaagccaacaacagcaaatagtaacatacttgaagaaacttcaacaacttttttgttaaaagtctgagttttatgttttaatcctccagcaagcatactggcaccaagtactaataatatatttcctattacagacccagctatagaagatttgacaacatcaaaaagaccttctttaagagcaaaaaaagatattatcagttctgttgcatttccgaaagtaccatttaaaaaaccgccaatcttagggcctgagtagaatgaaatttcctcagttgcttcacccataagtcctgctagtggtactatagataatgctgcaagtatgaacattattgatggagatacatgcataacaaattctgctataaaacttatcggaataaaaataagcatgtatttaagtaatttcatgaaatattgcctccttgaataattattataaatttaataattttaattagttttaattgaagattaaaataataattgagtaaaatttagagtttaatgaacacatcataatattataaactatatttttacattatgctatatttttctaattaggaaaatagttaaaggtggttttacctttattttaggaataggaaattattttattatttgcattttatgtggtatattaatataagaaattagtgtatataaatgcaaagtaatgttgtatgaagggatatataccattgctgcaaataaattgcataattatttaaattaaggaggaactgaaatgtcagtaaaaatgttgcatacttgtattagagttaaaaatttagaggaatctttaaagttttatagagatgcattaggtcttatagaaactagaagaaaagatttcccagaacataaattcactcttgtttatttatcaaatgagatggggggatatgaaattgaacttacctataattatggtgttgaaaaatacgatttaggaaatgggtttagccatactgcaataggtgttgaaaatttagaagaaatgagagaaaaacatatagagttaggatacgaagttacacctttgaaaggattaccaggagaaaaaccaggatattattttgtgactgatccagatggatataaagtggaagttatacgaagataatactcttatgcttgaaaaataagtaaattatataaatatatattggattaagagagattacgaaaatataaaagtagtctctctttatattttcataatatggaattggatatgtaaagatatacatttatatgatataatttatttagatatttaggatagagaaggttagattttatggataaaaagaaaaatatttatatattaattggagcaggaatagtaataattccatttattattagtttagctgctttctttttttacaataagacgcataaaccagaaaataaattactggagtactttagcttattaaattcaaaggaatatgaaaaaatgtatgatttgacggatggtgaaatcatacaaaagatgtccaaagatgattttattacaagaaacaaaaatatttatgaaggtattggtgctagcaatattgaaattcacataaaaaatgtaaaaaaagatggtgataaagctactgtggactatgaaaccagcatggatacaatatgtggaaaattagaatttttaaatagtgcaactatgagtaggaagattggaaaggattatgctttaatgtggaattctcaagcaatattcccggacttagctgatagtgacaaaataagagttaaaataataaaatctaaaagaggagacatattagatagaaatggagctaaactggcaacagattctttttcatctaacgttggaattgttccaggaaacttaggtgaaaacaaagataaatcaattgatgaaatttcaaaagtattagggataactgttgactatataaacagtcaactaaatgcatcatatgttaaaccagatatgtttattccagtgaagacaataccatatggtgatgaaagaattccgagtcttcttaaaattccaggagttaaaattaatgataaagatgcaagagtttatcctttaggagagcaggcagcacatctaacaggatatgtacaaactataaatgctgatgaattggacaaacacaaaggcgaggagtatactgaaaattctacaattggtaaatcaggacttgaaaaaacatacgaagatacattaagaggaattgatggggctgaaatatatattcaaaatattcaaggcgaaaagaaaaaatcaattataacaaaagatgttaaaaacggtacggatttaaaattaacaattgatggcaatttacaaagtttattatatagtcagcttggtagcgataaaggaacttcagttgctatgaatcctaatacaggagaggttttagcgctggttagcacaccagcatttaatccaaatgattttgtcttgggtatgtcaggggataaatggaatagtttaaacaatgatcctaagaaacctatgtataatagatttcaagcaacattagtgccaggttcttcctttaagccaattactgcggttattggtttagatacaaaaaagatagatcctaacgccaataaaaatataactggtcttagttggaaaaaggatagcagttggggaaattactcagttacaagagtaagcgattataaaggtccatcaaatctattgaatgcacttgtttattctgataatatctactttgctcaggctgcgttggatattggaaaggatatacttaaagataagttaaatagctttggattttttgataaaatcccatttgaatatccattatataattcacaatattcaagtgataaggattttaaatctgaggtacaactagcggacagtggatacggtcagggtgaagttttggtaaaccctgtgcatttggcagcgctttacactatgtttcaaaatgaaggaaatatattaacaccttatcttgtgacaaaggataattcagataaaaaaatatggaaagctaatgttgtgtcaaaagactcagctaatatggtacttcaagatttaatacaagtagtagaaaattcaggtggaacaggtcatggagcttatactagtggattaactatagctggaaagacgggaacggctgagataaaagcatctcaggatgataataatggtacagaattaggatggtttgttgggatgaccactaataaatctccaaacaatctattggtagtaatgatgattgaagatgttaaagacagaggtagtagccactatgtagttcctaaggtaaaaaaagctctggaaactgtaaattagtaagtttaataattgaaatttatatattaaatggctgtagatttatacagccatttttagtcaaatatattatgaatatttatgttaattagcgtgcagatgaaattatagatagattaggaagttaaaataaaattaggttaaaactcacgttcaaaaatgctcacttttttatgatcgtgaaagtcttctattgagtttataccaagtttattcaacacctcatcaagtactttactatgaactggaacctttatgggtgaatcataagcaaatttatcggctgattccttaccttgttctgtaggaattattgctttaggaccaccaacacatccgccaacgcatcccattccttctaagaagtttgcatcaacatttctatttagagcgttttcaagaagttctttacaatcttttacgccagaggcttttgcagctttaaaatacttgtgcttttcagggaaaagttcttcaactgtttctgatacagcaattgaaacgccaccactacgggcgtataatcttccgcctctagaagcgtactcaacggacggcacgccatccaaatcaccaggctttatgtctaaagctctgaatacttcgtcaagttcctgaaatgttaatacaaaatctactgcatcgtttaaatccttatctttagcttccgctttttttgcaatacatggtcctataaaaactacttttgcatcggaatcaagactttttatcattcgtgcagcagcaaccataggtgaaaccgatggggataaatcaggaacaagttccttgtaaacttttctaagcattcctatccaaatagggcagcaacatgaagtaatcatcaagtccttaggcccatttacatgcttatcaaactcaacagcttcttttattgttaatacatctgctgcaaaggcaacttcgatcatatcagtaaaacctatttttataagggcagccctgatttgatccatagtaacttcatcaccaaattgaccgctaatagcaggagcaactgcggcaaagactttttcattgttctgcattaagtctaaaacaggaagaaaataaactttatctaatattaatccatgcttacatgaatcgacgcatacaccacaatttaggcatttatcattatctatgtaggttgatttttcatttttatcataaagaatggcatcaaaaggacaagcaacctgacagctaaatttaccatcttcatttctaggacatgattcatcacagcctttaagtttttcaattaatcttgtattaactgtatattctgtaattgctttttttaaattatatacataattattatcgaactccatatcaacgccacacaacgatctaataatttcaaaagtttcttgtggagactttttatgacataccataatacgtttaagagtttcgtcaaaattaccattgtaatatgatttgactaactcatcgaataaatcattatatttattattcattaagacacctccaaattgcaaaaatatctattatatattattatatatttatttgcatatattaatactaaaattcagcataagttaaattaaaatagaaaaaaataagaaaatggaaggaaaaacaaacagagatgtagaataaatatttaaattacaattaataaattttatgttaatcttgaattttattaattgtaaacgtataattagaattgaattttgttcttattggggagatgtagaaatgtttatttatatattaaatattctaaatgatggggcacggaaaaataaaattaatgagttatcaaacagtgaaattattaatgatacagattatatctcgaggttagcaaatattaaaagaggttctgatatcaaaagttttaatagtaaaatagaagatattatagcaattttggataaatataaattgaatagaaatgacagaattgaacttttaagtaagtttatagtttataatgactataattggataattgaaaatgcacatgataatttttatattaaaagaaaagaaaaagtaattatagattcaatatcaatgttagaaaatatgttaatgaaagcgatgttttagatacagaaagagatttgattgaaatattaatttaaaataaaaaggagcactaaatatagtgctccttatattcaatgaaattaagctctgtttactgaaccgaataattccattttttctttaactgtagctttgatagcttcgaatccaggatttaataactttcttgggtcaaatccttttccttctaaatcttttccagcttcaatatattttctagtagcttcttggaatgataattggcattcagtattaacattgatcttagctactccaagagatatagctttctttatcatatcttcagggattccagtaccaccatgtaatactaatggcattgaagttcctacagcttcttcaattttagctaatgcatcaaaatctaatccagcccagtttgcagggtattttccatgaatgtttccaataccagcagctaacattgtaactcctaattcagcgatttgtttacattcatttggatcagcaacttcacctttaccaattactccgtcttcttctccaccaattgagccaacttctgcttctaaagaaagtcctttttcattagttatagcaactaattctttagtcttttcaatattttcagctattggatagtgagatccatcgaacatgattgatgaaaatccagcctcgatacatttttttgcaccttcatagctaccgtgatctaaatgtaaagcaactggtacagtaatgtttaattcttctatcattgctttaaccattgcagatacagtcttatatcctgtcatatattttccagcaccttcagatacacctaagataactggtgaattattttcttgtgcagttaataatatagctttagtccattctaagttgttgatgttgaattgaccaactgcgtattttccttgtctagctttgtttaacatttctttagctgatgttaacattttacgacctccgtatacttgtatatttattataataactataatagcttaagaaaactgatttatgtactttacacatcagtttttcctttttcaaacttattatactctaaaattaactatatgaaaacaataaattgaaaaatctgcttcttttaataaatcatatgtatctttatacgaaatttacataatatatatttagataataaagaacttattttatgaaagagtggtaatatgtaggattatgtataagaaaaagatttttaagggaaaacttgaaacattttaaaaatgattaagatgttaaaattttattacatgtgaggaggtcattttttgtttaacataggagataaggttgtatacccaagtcaaggaatagggataattgatgttatagaagaaaaagaactcaatggtgaaaaaataaaatgctatataatacacttaattaataatactatgaagttaactttgcctattagtacagcaaatacatctaatatgaggttaataagtgatattaaaacgttggagaatagcttaaaacatgtagatagatttacggaagaggcagagaagttttctaaaattaattataaagaaagaagaagcgtgagcaaaataaaaataaaatcaggtacatttgatgaatttcttgaagtaatctttgatctaacacaattaaaaaaatggcacagtttaaattcaagtgaaaaacaaatgttaaattatataaagaaaattgtcatagaggaaatcgctcaagctaaaggattaacaagcaatgaagcttctgagttattggatttttcaattaatttaaataagttaagttaaaaggtttgctattttactgaagtatgttataatagttattgtaaataaaaggttttttatagatatgtaaatttctcctttagagaattatatgaatcaatatattaatctttagttaaaggaggaactttatatgacagataagactttagtatgcagagattgtggagaagaatttgttttcactgtgggagaacaagaattctaccaagaaaaaggatttactaatgaacctacaagatgtatatcttgcagaagaattaaaaaggaacaaaataatagaagataatattattttattaagagttgtaagattttcttacaactcttttttgatatataaagggataaaagagtaaatattaaaatctaattatgttaattgagtaagtagtataaggtaggaaaataaattgccccgaagtatgcgtggttaagtcacatttactttataggagctcatatgatcattttatatagcattaactgaagtttttaatcattgtgataaagtcacagaagatatcagccattttagctaaacttaaattaaagaaatgcattgcatttataaaaggagagagctattatggagagaaaaattattattattggtggagttgctggaggtgcctcaacagcagctagacttagaaggttagatgaaaatgctgaaattattatgatagaaaaaggtgaatatatatcttttgctaattgtggacttccatattatataggagagaccattgatgaaagagggaaactaattgttcaaactgtagaggaaatgagtaataagtttaatttagatataagaaatttaaatgaagttattagcatagataaggaaaacaaaaaagttagagtaagaaatattagaacaaaggaagagtatgatgaaacttatgatattttagttttatctccaggagcagcaccaatcaggcctaaaatacctggaatagagtattgtagtagtttgtttactcttagaaatataccagatacagatagaattaaagcttatgtggataataataaaccaaaacatgcaacagtaataggtggaggatttataggcttagagatggtagaaaatcttcatgctaggggaatagatgttacacttatagaagcaagtgaccaggttatggctcctcttgatatagaaatggtgagtatattgcatgaacatttaatagataaaaatgttgaactaatattaaaaaatggagtgtctgaatttaaagacaatggaaaaaaaattatacttgatagcggaaaagaaataagaacagatatgataatattatcaattggagttaggccagaaacagcaattgcaaggcaagctaatcttaaattaaatgaaagaggcgctattatagttgataaatttatgaaaacttcagattcaagcatctatgcattgggagatgcagtagaagtaatagactttgtaaataaaaaaccaacaatgattcctttagcttggcctgcgaacagacagggcaggatagtagccgataatatatgcggaaaaaatgctgaatacaaaggcactctaggatcatctgttgcaaagatatttgattatacggtagctacaacaggcaataatgaaaagatattaaaaaagttaggtatagaatatgaaacaatccatatacatccaggttctcatgccggatattacccaggatcttttcctatatcattaaagatgttgttcgatccaaggtcagggaaaatatttggagcacagggtgtgggaattgatggtgttgagaaacgtatagatgttttagcaacagctattaaagggaatcttacagtttttgatttgcaagatattgagccgtgttatgcacctccatataattctgcaaaagatccagttaatatgcttggatattatgcatcaaatattgtggaaggaataacgaaaacaattcaatgggatgaaattgatagcttagataaagaaaaatcagcaattatagatataagagaagaatttgaattagttacaggtactttaaaaaattctattcatattcctttagaaaaattaagagatagattaaatgaaatcccaagaaacaaggatatatatgttacatgccaagttggtctaagaggatatattgcttgcagaatacttgaacaaaatggaataaaatgtacaaatatagatggaggaatgaaaacatatctatatgtaaagagagctaaagaaatgattagagatcagtttaaaaagagtgagagaattaataatgaggtagccgtaatgagggaagaaaatatagatttaggcaaagtaaatgctgatattaagctgaatgcatgtggccttcaatgtccaggaccaataaaaagagtgtttgaagaagttaagaaaatggaaagtggaagtgttttagaagttaaagcaagtgaccctggatttagtaaggatataaaatcatggtgcgactcaacaggaaatacattactaaaatcagaatttgataataaaggaaaagcatttgtagcgtatattcaaaagggaagagaattaaaatcagtcgaaaaaacactatctccgaaaactgcagaaaaaaatggagctacattggtagtatttagtggggatttagataaagcaatagcttcgtttattatagctacaggagcggcatctatgggaaaagaagttactatgttctttactttttggggattaaatatattaaaaagtcaagataagcctagtgtaactaaagatattatggaaaaaatgtttgatactatgctaccagcacatgctggtaaattaccattatcacaaatgaacatgatgggtatggggcctgttatgataaggaagataatgaaaaagcataatgttgatagtttagaaacattaataagaaatgctatagatatgggcgttaaagtggtagcttgttctatgagtatggagttaatggggattaaaaaagaagaatttattgatggggttgaaattggtggagttgcttcatatttagggtcaacagaaggttctggactaaatttatttatttaattaataattgtttgtaatatgaataatttatagacttggtgattaataatttcatcaagtctattttttattgtttgtttttacaatgattggtgataatataaaattatagaagacaagtatcgggattaaaatatataattaaaatgggatatattttaatttgaagatattataatcaaggtaaaacaagttaataaacgtttatataaagatattaatatgaaagcgaggaattttatgagagatttagaaaagggctcaaatttaaagacaaaaaagaaaaatacgagtatgatactagctgcgttcatgattttcattttgccaataatattggtatttataggggcttttataggtggaataataggcgaaaatatgctggtggcttctaatagaacttttcaaatcgtaggtggagtaattggctttttgctatcagctataatagtcaaagcgtttgataaacattcaaaagcagatgaaaaggctgagaagatttattgggatgatttataaataactgatagaagcaataaggaattgctaaataaaaaatatttgttgacaattgtttaatatatagtaactaagcatatatttcccacataatttataagtacaagaacttttataggagaaatatatgattaacttagtattaacaccgcttcactatatttatcttatttttatcattataattatattggctatggtgaagaagaaagatatctctcttttatgtatactaggcatttttattctgggattggctggaacagaatcaatttataaatctgtaatgggagtatttaatagttttgtttatgcagcaaaggaattgatgccaacaatttttataatatcaataataacagcaatgagtaatacattaatggactctggaataaatgatgagatggtgtctccttttagaaaagtgattaaaaattattggattgcttattgggtaattggaatttttatgatggttttatcgtggtttttttggccatctccagcagttgcacttataggggcattgtttctccctattgctaagaaagctggacttccagctatgggagtagctatttcaatgaatttatttggacatggtatagctttatcaagcgattatataattcaggcagcaccaaaacttactgctgatgcagcaagtataccggtttctgaggttatatctgcaagtattccacttgaactaacaatgggaatagttacaactgttgctgcattttatttccttagaagggagattaaatcaggagagctgcctagtcaatacgaggaaatagaaaattcaacatcaatttcaagttcttcaatgcttatttcttcaaaaaaagtaagaaggtttttagcattattaattctagtattgtttgcactagatatttttataatgtatattgctaaattacaaggtggtgatgcaacagcgcttattggaggtactgccatatttatcctgagtttaatttcgatactagcttataaagaaaaatccctagataaaattactgataatcttgttaaagggcttcagtttggttttaaaatatttggagtcgttataccaatagctgcatttttttatttaggtgactcggcgtttacagatatatttggaaagatacttccagaaggctcaaacggcatagttaatgacttaggtgttgcgcttgcaaataacgttccaataaactcaactatttctgctggtacacttacagtggttggtgcaattacaggattagatggatcaggcttttcaggaatatctttggtaggatccatttccaaaatattctcaactgctttgggaggtggcgttgcaacgttgacagccttaggacaaattgcaggaatatgggtaggtggaggaactgtagttccatgggcaataataccagtagcagctatttgcggtgtggatgcttttgaattagccaaaaaaaatctcaaaccggttgttataggattaatcattacaacaatagtagcaataattattatttaaccagttaaataaggctaagttaaatagctatagttattaaaatagaatattccgattaaaagactccactaatttttgatttagcggagtcttattatatatattgcaaaaataattcttcataaaatttctaaaaacattgcaaaaattctagtcgtaattgtgaattgtgaagtgtgcattgtgaattacaacataatatataatgaaagatgcaatttgaaatataaatgaacccatacaattgctagagaactcctatagtgttataataatcacaacattttcctatgaagatagaataatacaataagggggactattatatggaaaataagaattcaagaattgtaaaagtaattcagacaggtgtacttgcagcattatgttttgtatcatttacttttctttcaataaaaatacctgttggtgaggatgcggtttcactgcacattgggaatgcattttgtgtattagcagcattgcttttaggaggctggtatggtggattgtcaggggctatagggatgacaatatcagatctattagatccaacatatgcaatcggagcacctaaaacttttattttaaagttgtgcattggattgataactggtttaattgctcataaatatgcaaaaatagatgaaagtatggataaaaagtatatagctaaatggactattattgctgcaattggaggattagcttttaatgttatttttgatcctatagctggatacttttataaacaatatattcttgggcagccacagcaaatggcagcggtattggcaaaaataagtgtatttgcaacctttgttaatgccgtagtatcagtaatattagtaagtattatttataatgctataagacctgttttatcaaagtctggattattattgccagttggagaaagaaaatctatagtaaaataataactttatttttgtatgtaagaaaccatcaaaatcacaatttctgattttggtggtttttgctaattaaaaatacaataaattttaatttttataagagcatactatcatatagatgagagttttattctttgctcttgggctaacgttcgtgtttataagaaaaaaaagaagaaaaaaataatttgttattgatttttattaatatatgagctaaaattacctagtaataagaactatttttgaaaaaaagttaataatattcacttatataaatctgacaataagggtcggatgtttctaccaagctaccgtaaattgctataggactataagtgtctacttaaaaattatatttaatgtcaaggagagataagaatgaattatgatgtaataatagtaggtgctggtccagcaggaatatttactgcatatgaactaaagaaacaaaaacctcaatctaaaatccttttagttgaatcagggaagagcattgacaagagacattgtccaaaagataaaactaaaaagtgtgtatcatgcaaaccttattgtcatattactactggattttctggcgcaggagcgttttcggatggaaagctatctttaagctatgaagtaggtggagatctacctgaacttgcaggtgctgatttaatacaagaatacatagactatacagattcaatttatttggattttggagcagatactaaagttgaaggtgtaggaaataatgaagcagttaaagaaataagaagaaaagcaatacaaggtggattaaagctagtagattgtccaataagacacttaggaactgaaaaagctcaagagatatatttgaagattcaaaaacatctattaaatgctggcgttgaaataaaatttgatacaacagttaaaaatcttttgataagaaacaatgaagtatctggggtattaataacagattcattaactagaagtaatgatgaagaaatgttttcagataaagtagttgtagcaacaggtagaaaaggtgctgattggttaaaagacatgtgtattgagcacaagataaatcatagtgcaggaccagttgatataggtgttagagttgagctcaggaatgaagtaatggaaagtgtaaataatgtactttacgaatctaaacttatagggcatccagcaccatttaaagataaggttaggactttctgccaaaatccaggtggttttgtaagtcaagagaattatgataataatttagcaatagttaatggccactcttataaagataagaaatctgataatacaaacttagcaattttaagttcacataatttttcagctcctttcaatgaaccaattgaatatggtcagaaggttgcagaacttgttaatatgttgggaaatggaaaaatattagttcaaagatatggagatatattggatggtaaaagaacttgggaaaaggaattgtacgaatcaaacgttagacatacattaccagacgcagaagctggagatttaacatcagctatgccatatagaactatgacaaatattttaaactttatacaagccatggatacagtagttccaggatttgcaagcagagaaacattattatatggtccagaaataaaattctacagtaacagaattgatttggataaaaatttcgaaactaatataaaaggcttacattgtttaggtgactcaagtggatggactagaggacttatgatggcatcagccatgggtgtgataatgggtagaaaactttaaaaatactaagttgtattaatattaagtattcataaattcaggggatgataacatctattaaacagtattctacataattttttatgaaaattatgggggatgctgtttttttattgtctaggaaagtatagaattttttgattttgaaagtcagtgataccaatggttataaggatattggcttgtaaaaagtggtatcaagaaagagcgtggcgcagccactttgttctaaaatatatattaatttaaatgatgtgttattagtaataacctaaagttaagattataaattgtataaagaaatatagatatcaaattcaagaattggacttattagatgaacatatttacaaggttgctaaaatttcaagttcatatcttcacaagaaatcataaatatatttgtaaccacaagggtcataatatgaagaaaacatttgaaaatgagctgttaaaggttcttagctgtaggttgttccattttagcttgtcaaactggaagttggagcatgctaaagtgggtataacctgctgcttagaaccttcagcgatattttcatgccttttcggaatcaaaatatttattatttcggtaagttatcacataaatgcagttttaaatttggttatctatatgagaattataaaattaataagggtaacttattacaatacataaataagttacccataaacgattttatatagaaggataaatagttaataagaaattatcttattttcttaattatagcttataattattacaaaattataacaaatatgttaattcaatataaacattatattaaaataaacttaaatatgatatttagggacagtaaataaaattttttatacatttaataattacctttaaatatgtaacaattattgtaaggtaattattgcatttaatgttgatttttcttatattattgttataatatatacatagaaagacataaagcaacataaatatacaaagattgggaactatgaagaattctctgtatttgggcatcttgagaatttggagttaatgatgcaacccaccaatcaaaactaattaatttttttaattagttttgattggttttttatatttttggagttaaacataatagagttaaaagtaaataaaatagtttttaaagttaatatatgagaggtgatatgctatgaagatacataatgaaatcatgaaagttataaatgataatttagcaaagtgttctaaatttgaatttgttgcagagttaagagatttaactttagcagatatgtattatattgaaaagatatcgagtattgatagtataaaagcgaagttcaattataaaataataaataatacttatataaagattaattattcacgttaattaatatgtaggaagaggaaagacatgacactaactattaagattaaattaggtaaaataaagaaaacagaagatgatgagaataaaataattacagacttttctcataaagaggtttaattaataagaatcatggacattagaaatattgtttatgattcttatttttttgctataataatatagtagattttacgaggagagcaatggtatgaataaaaaggtatatgagttattagaagagataaaattacattcagagaaaattagtgattgggagcaaatgacaaatatatttgctaatgctattaaaagaaaaggattgaataatgaagaatttgaagagataagtgagagaatacttagagaagtcagaaaaaagtagaagtggatttagttgatttataatataaatgagtttccttaattttataatttaaagaaactcattttttattaatatatattttttaactattataatccagcgcttttgattctttttctaatttgaggccctattagtgatgcaactaccatctttgcgaggtcaccaggaataaatggaagaacaccaattgttaaggccttattaaatggtagatgtgcaacatatgctagccatactgttccaaatatgtaggttactagtgtacctagcagcatacctaaaaagcacatgaaaattttattaggaaatttatcaataaataatccacttataaatgccataaaagcgaatccaattaggtatccacctgttggccctgctaatttagtaaatcccccagagaatcccgaaaaaactggcaatcccaatgcacctatgagaagatagataagataactaattgttccttccctttttccgattatatatatagtaaggtaaattgctaaatttgttaatgtaattggtactataccaataggaattgaaaacggcgcagatgtacatataaaagcactcattattccgattattgttaactgacgcgcgttagttctacgtatattttccataattttaaatctcctttatatattatatttcttttctataattcctttttaattgaaaaaccgagtgtttgcaacattattttatcttgacatgtattgttacctacagtagtcagcatatcaccagttatcgttgcattagctccagattgaaaaatttctatgccgccatcttcaaaataagttcttccggcagccatacgaatataagctgttggatttatgtaacgaaaaattgcaatcgttcttaagatatcatcattagaaatcctttttaaattctctaatggagtacctttgataggcattaatacatttattggtatagatataactccaagttctgataagcttatagccatgtcaattctgtcataccaagtttcacccattcctataataccaccggaacaaacttttaaacctgcattttgcgctagtttaatttctttaatcttgtcatcatatgaatgagtagtacaaatattgtgaaagtttcttttagaagtttcgatgtttgcatggtacattgtgactcctgcttcttttaaaagtacaaattgttcttcacctaaaaaaccgtgagatgcacataggttgatagaacattctttattcatcattttgtatgcttgtacagctttatcaaaatcgcttccaactaatgctcttccggctgtaacaatagagtatctatgtacaccattagcttcattttttttgcagtcttttaagattgcattaggatctaaaaaatcatattctttaatttctgttttgtggtgttttgattgagcacaaaacttacagttctcgctgcattttccactgcgaccattaataattgtacaaaggtccacgttttctccgcatagtgttttacgaattttattagcaccatcacaaattttctttaaatcacaagttaataaaaattctaaattatcagatctagttaatcgtcttccgttaataatttcttctgctaatttttccatataattttacctcgccccaatttattaaataatttcaagacaagtatataattaatatttaatattgtcaactaaatataaaaaaagagttaacaatcttagctgtgcttaatatatgcatataaatcaaatggcttaacaaaatattttataagtatatataatatatttcaattaagtttctataattatagtcttaattaagcacttggtttgctagagattcaaatataaatttattattttaatctatataagaaattgcatagcactaataaaaataaagtttagtttaataagaacaaattttcatagaatagagtaatgtaatatgtagagtattcgaatagattaaaatatggttatgagtaggtgctagaatgactattgattttgataaagttatgcttaatataaaacaaggctattataaatatattggttcaggttctggcaggaaagtattcgatttaggaaatggatatgttttgaagatagcaaaaaataaggctggaatagcacaaaataaggctgaatatattatttcggataatgatcatactaagttatttgcaaaagttatacaagtttcaagtgactttagcttacttataatgcaaaaagcaagcaagataagtgatattttatatgtatggaagtattttaatgtatcgaatagagatgaatttttaaaaactcaggaattgcaagaaataaagaaaaactataggttgttattgggggatttttgtaggaaaagcagctggggaatgattgatggaaagccagttataattgattatggatttacaagagaagtggtggaaaaacattattctttttaagatcttgaattcagtaaagtaaatttaaggctctttctaaccataaagtattccaaagattgatgtatgtagcttagagacatttcgggtgattcatcatattatgaattaatgattaattttttgaaggggaaaatgagatgcatactttagggcagggcggtatctatagcttaaatgattttaacgatgatcaatgctcatctaataagctaaaagttataggaaaaggaacggtaagtgtaaaaccagatttagcagaaatagtcgttggagttataactgaagatttgcaattggaagttgcgcaggaggagaatgctaagataactcaagaagttataaatagtataagagccttgggaatacctcttaagaatatacaaacagaaaactatagcatacgtccaaattatgattatatcaatggaaagcaggtttttagaggatatgaagtaataaataatttgaaaattttaattagcaatgttaataatgtaggtgtagtaattgatactgcagtaagcaatggggcaaattcattaacggggattatctttattgtctcagatgaaacaaagtattattatgaagcgttaagaagagctctccaagatgctcaaaataaagctcgagttgtagctgaccaacttaaagtaaagctaaatattataccaattcaaataaatgaacaaaatgagactactagtacaccactagtaatgactcttaaatctactagtaatactacccctattgaagcaggagaaaatattataaatgcagatatagaggccatattcacatatgtaggataataaaaataattagaagaagagtagttattagtttaagtttttaaacatttaccttagttttaatttaggaaaataaaaagccaatgcttaatattaagcattggcatagaatgtcttatataatatccaaaataccggtactctaattttgacccctatccttcgataggtgggtgccctcacagatgattcaatcgccttcaaagccgtaaaaggactcatatgaaagtacatttccacatctagataattgaactcccgtaatttaagtgtaggttcaaaataagagcttaacgaatatcccagaatttataatcaatatataagcctgcttgaacaacttaatatcatttgttcttaggccgtgaagatataataacatatttaaatttcttatgcaagaggtttttatgataatttagactaatgtttatagataatttgtaatagtatttacacaaggaatttaagcggtttttattaaggttgtttagaattaatataacaatatcttataaagaaatctgttaaacctaaaggtatagagaaaatatgatacaactaaattatgctttagaaacaaaataatatatttttaaaaatatattgaaacaaaatttcaaaagtgttatgatgtatatatcaagtgaaaacgtagtcaaaattaaatgttttatatggaggcgatgattgtggatagtttaaatttaaaaaatctaacaactgaaagcagaaatgaaactacaataaatatagataaagtatcgactttagaaatggtaaaaatcatgaacgatgaggataaaaaggtggcaaacgctgtagaaaaagagattcctaaaatagcaaaagctatagatatgatagctgaaagaattcatagaggaggaagattaatttatataggtgcaggaacatcaggaaggcttggcgtattagatgcctcagaatgtccaccaacatatggagtttcagaagaattggtgcaaggaattatagctgggggaaaagaagctatatttagagcaaaagagggagcagaggattcagaagaattagcagtgaaagatttaaagagtaaaaatataacagagaatgatacaataataggacttgcagcttctggaagaaccccttatgttataggaggattaaggtatgctgatgaagtcggtgcgttaacagtttcagtgacttgtaatgaaaattcagatgttgcaaaggaagcttatatttcaattgcgccagtagttggtccggaagttgtaacaggttcaacaagactaaagtctgggacagctcaaaagctagtattgaatatgatatcaactggtgtcatgattaagcttggaaaagtatatggaaatctaatggtagatttaagagctacaaatgaaaagctaattgaaagagcgaaaggaatagtttgtaaagcaacgggtataaacatggaagaggcaacagaagcactaaataaaacagattatgatgtcaaactagcaatatttatgatactttcaaagctagataaagatgaggcgagaattaaattagataaaaataaaggttatatagctaaagcgttacaagaaatagataataagtaaaggagaggagatttatgacaaataaagagattgctataagattagtagaattagttggaggtaaagataacgtaaaatcagttactaattgtatgacacgctgtagatttgaattaaataacttttcaaaagctaatgtagaagatattaagaaatcagaaggggttcttggtatagttgagactaaagaacaactacaagttatttatggaccaggaaaggtaaataaagtaactgaagaagtaaagaaaataataggaacaaaggtagttataggagaagatgcagtagctgaaacaaaggctaaattgaaggaaaagaatgatactaagtttaagaatattcttaaaaaactaggaaatgtgttcattcctttgattccattatttgtggcttgtggacttgtgcttgcaataaataacattgcaggagtgtattttaaagatgcttatacaaaaacaacagctgctcaaattatagggcttataggaaatggagtattttctatattatcagttttagttggtgtaaatgcagcaaaagaatttggctcacaaatgccaatgctcggtggagtattaggcggaattctctcatcagcaacccttgcaaacataactctttttggacaaaaattaactccaggacgtggaggggttatatcagtaatattggtagtagtattagcttgttttattgagaaagcatgcagaaaagttgtaccagatgtattagatttgtttgttactccattagttacactttcagtttcagccttagcggcattatttatccttcaaccagttgggggagctatttcagatagtataggattcttagttgcaaaaacaatagcatcagacaatattcttatagcagttatatctggtgctgtatcaggaggtttattcttgccattagttatgacaggaatgcatcaggcgttaactccaatacatgcagatttaatagccaatgttgggtatactgtattattgcctatactagcaacagctggaatggcgcaggtaggagcaactatagctgtactaagaaaaacaaaaaatgaaagattaaagaaaattgctaaaaatggattagtaccaggatttttaggaataggagaaccgttaatatatggaataactttacctcttggtaaaccatttattggagcttgtttaggagctgcagtgggtggcgcagcaatggcgatatttaaagtaggagcagttgcaatgggggtatcaggactacctttagcattgttaattgcaaatgggaaaattggagtgttcttaataggggtattggtttcatatgcaagtggatatctatttactaacattttaggcttcgacgacccaattgaataaagtttaaaaagacccgaaagggtctttttagttaatgaataagagaatagaattatagtagttatataaataaattatcattatatgtgaattataaaaaaacttttatttaatttcatataaatctagcaaaggggcattattatgaattatggattttctgtttattttggattggataatactaaagaagaaaatataaaattgttaaaggatgcacataatcttaatattacaaggatatttacatcccttcatataccagaggcaaattatgatgttttaaagttggaagtaatagaattctttaagttagcaaaagaatataatatggatataataagtgatatatcacctaatacttttaagttcttagaattagaaaacatggacttaaaaggattaggtaacatgggtgttaagactattagaattgattttgggtatatcgaagaagaaatagcgagaatgagcaaaaatccttatggaattaaaattcaattaaatgcatcaacaattactaagagattttttgagagattagataattattcaccacactatgagaatatagatgcacttcacaatttttatccaagggtgggaactggaatctctgaagaatgtatgaaagaaaaaaatgctattttgagcgagcgagggattaaagtctctgcttttgtgcaatcaaataatagaagaagagcgcctttgaaagatggattaccaacattagaggatcatagagggaaaaatgtaagagaagctgctaaccatttatttgcattaggaaatcaatgcgttttcattggagattctcttccaagtaaaaaagaactagaagatttatcatcattagatcctaatgcagttgagctactaatagagttaaaagattataatgatataactctaaaattgctaaaagaaacttatacccaaagaatagatgaggctagagatgcaataagggcagctgaaagtagattacttcttaatggagaaactatagagccatttaatacaatagacaagaacttcggtgatattacattggataatgtaaattatatgagatatatgggggaattacagattcttaaaacaaatcaaaaagctgatattagaacaaatgtcatagcttcagttgcgaaagattacttatatttattgaaatatatagatggtggtaaaagattttattttaatataaaataattgtaagagcaaaaccaagtacgataaggtgtgagattatgaatgtattacagtatattaagcaaaattatgacagttttacagatagagaaaagttaatagcagattatttaatagaaactaaggaacggattatatcaatgtctgcaagagatatagctgaggctacaaaaacttcagctccaacagtagtaagatttgctaaaaaaatagggtttaatactttaaatgaattgaaactaaaattatctattaatattagcaaagaagaggaagcaggagctatacagtttcaatatttagacaacgatttaggaacaaaaaatattatctatggaattaaacaatcagtagattcaattatggaacaaacggttagcttactagatgaagaatgtttagataaagcaatcgaattacttataagcgctaaaaatatttatatctttagtgtaggggtatcaggacttgttggtcaggatttctattataaactaagcaggatgaataagagatgtatatgtaatacagatactcaccttcaaataacttcatctgtattattagaagaaggagatgtagcactagcaatatcatattcaggagagactaaggaagtcattaagtgtgtaaaaaatgcaagacatagaaaagttccagttatagcaataacaaaggctagtgtaaataataccatagctgatatttctgatatagtaattcgtataccagctgtagaaaaatcaataagagaaggagcaattagctcgagaatttctcaattagcaataatagatatgttatatattgggatgattagaaataacataaaagaagtagaagagaaattaatttctacaaggaaagctgttaaagaactatagcagtaaaaactatataagaattaaaacatatttacatttaaaagtgaaaaagtatttaaatttaacaatttaaaaaggtataaagaaaacaagttataaatggaaaaatatataattttaacaagaaaacaatttacaggaagaatcagggatatagatcatttatatcaaggaatcaattgcaaaacagcaatttctaatagtagaatgaaaggctatgaaatgcaataggttggaagatgtgtggtaaatagcttatgaaaatattaataaagagggacagagggaggagaaggaaaattcaaattataaatattataggattaaaataaaagctatggttataagagtgtttgatatcttataatcatagcttttgaactaatgaattttaaaaaatatttagagacaaagttaaaattctttaaaaagtatttgactcttattatttttcaaaaactttaatatctaataatgaaaatagtagctatttaattattagatctccatcatatgatgtaattattttatataaatcagggcgacgatctctgaatattccccattcaatacgttgtgtctccaattgatctaaatcaaattcagcaactaatactgtttcttctgtacgattagcttcaacaagtttatttccttgaggacctgctataaaagaagaaccataaaatgttattttagaatcttcatcttcttcaaccccaacacggtttgatgcaattacaggaactaaatttgcagcagcatgacctaacatgcaagcttgccaatggtcttttgaatcaatagaaccgtcttgtggctcagagccaatagcagtaggatagaatatcatttcagctcccattaaagtcatgcatctagcagcttcaggataccattgatcccagcagatacctacaccgatttttccgtagcgtgtattccatactttaaatccggtatctccaggattaaagtagaatttttcttcatatccaggaccatcaggaatgtgactctttctgtaagttccaagtacttcaccattagcatctattattgctatagcattatatctagcataattcttcttttcatagaagctgattggtaacactaccttaagctctttagcaatttctttaaaatgatttattgctttattttgtgctacttcggtagcatatacgtagtaatcagatttctctttttgacaaaaatatggagtttcaaataattcttgaagtagaataatttgagcaccttttccggctgcttctcttacgaatttttctgctttagaaatattttcgtcaatattgcatgaacagctcatttgtgtagctgcaactttaacttttctcatgttatcacctcatcttatttttctatagtacttttaggtttcttggaaatggcatttgttgtgttgtgcaatgtacattaccgccttctttaataacagccattccatctacagttcttattcttctttttgggaaagttaaacttaatactttctcagccattttgtctgcttctgatgcatttccaccaaaagtaggtaagataataccatcattaacaaaataaaagtttagataacttagagttagcctttcacctttgtattcagctctaggtggttgattaattgggataatttcaaactttctgccttttgcgtctgttgaattctttaagatttcaatattttccaaagtaattttgtaatttgcatcatttggatcatcacaagtttgaataattattttagtaggttcagcaaagcaggctatattatcgacatgcccgtcagtttcatcaccatctagtccgttctttagccaaataattttttctatgttcaagtattgttttaaatatgtttcaatttgctctctagtaaggttaggatttctgttaggatttagcaaacattcctcagtagtaatcaatgttccctcaccatcagtatgaagagaacctccttccataattaaaggagcatcaaattttttaatattgtaatgttctaaaatttgcggagctactttatcatctaaatcccatggtgcatatttttcaccccaggcattaaacttccaatttacacctgctctatttccttcatcgtcaattaggaatgtagggccattatctctaagccatgcatcactatgttcaatagggagtagttctatattagactcactaaaaagtttttttacattatccaattcatatggattaacaattactgaaactggttcaaattcagcaattgcttgaatatattctgcatatccagcacaaacatctttatagttatctggatgacacattgaatcttttactggccaagatatgaatgtacgctcatgagcagtccattcagcaggcattttataattaaaatcttttggatacatacaatacctctttttcatgcttatattttatatttttaatactatatatagtatctatcatataataaactccacattgcatcaatgtcaaggcctgaattataggaagaatatagatgaatttttaacggttacatttttaagaataaggtatattttttaccttgtttatgtttttatgaaaattgtagaaatatacatctataaacgttatcataagcctaatacaaaatattacactatttttataaattaaacgtataattcattgtgctaaaattatagtggttattataaccatgtttcatagaataaagtatggagtgattattatgagctatattcaaaaaggtacacgtgaatttcgccatgctagtattgctttatttgctggcggttttaatacatttgcgattttatattgtacacaaccattaatgccttatttgtctaaggaatttggtatatcacctacaatggcaagtttgtcgctgtcagttacaacatgtacattggctgttagtatgttgatttttggttcattgtcagaggttcttgggagaaagccaattatgtgtttttctctttttgcttcatcaatactagcagtattgacggctattgttcctaattttaacagtatgctagtaatacgatgtttgcaaggatttgtcttagcgggattgcctgcaatagctatggcttatattagtgaggaaattgacaaatcaagtttaggattagtaatgggattatatataagtggtaattctataggtggaatgagtggacgtattattataggagtaattaatgatttttttaactggagattagccttagcggttataggtattttaggccttatttcaagttttttgttttggagaaagctgcctttatcaaagcatttcgaggctaggtcctttgaaattaaaaatttaattaaatcgagttttaatcatttaaagaatcctaatcttctttgcttatattgtattggatttttaattatgggaagttttgtttcgttatataattttataggttttcaattaattgaacgaccatacaatttgagacaaactttagtgagctttatttttgtaatatatatagtaggaacatttagttcaacatttatgggacgtctagcagataaacatggacaatatataatgttatgcatttcaatttttataatgttatttgggataagcattacattaaatgtaagtcttttgctaaagattattggaatagctcttttaacatttggtttctttgcaggacactcaataattagtagttggattggcaaaatagcaactcatgataaggctcaggcgtcatccctttatttattgttttattatgttggctcaagcgttggtggaactgctggaggaacgttttggtctttatatggatgggaaggcgttgttattatgatatcatgttttttagcagttgcattttttattctaattggcttatcatcagttttaaaacttattaaggtagaaaatcatggatagaatttggtttgtttctagaaaaaaccaaaaagccaatgcttaatattgttaagcattggctttaaatctctaaaataagatccaaaatatcggtactccaattttgacgcctatctctcgacaggtgggtgttttcaaagatgcctcaatcgcttttaaaaccgtaaaaggattcactcaaaagtacatttcatcatctaaatattaaactcccgaatttaatttgtaggttcaaaataagagcttaacgaatatctcagaattaataatcaaggaaacgtgcactcattgttgacaattaacatacttgcgctactaatatagttagctcaaactaggtttatccacggcactcagaagttatcatttaccgctgcttccttccagatctgacggaattcatgagtttctgctgcatgggacccgattctcaacaccacttgtattaggctgaccaaatagattaaagcctataatgagaattcaatcctgctatagcggattgcaggttacagggcaccgctagctccccatctagcacgaaaattacttataatgacaagcattttcttgccgtgaaataataataacatctttgaagcttatattcaagagacatttccgtgggaatttaagttcatatttgataagtttgcagtatttgaaaaaatattcttataaaaagttgtatgatcagttaggaataaattatcttaacttgttgaacaataataacgaatatgttcatataacttgagtaaggagtactatttatgagtattaaaaatgttcagcgtcaagaaatagaaaaagtttatggtaaaataagtccatttgaattcaaaaatgaattaataaatttagctgaaggtcaaagaaaaaagagcgcacgtacgctattaaacgcaggaagaggcaatcctaactggactgctgcaacacctagagaagctttttttacttttggaatttttgcagtagaagaaacaagaagagtttggaatgatggcgatttagctggcatgcctaaaaaagaggggatagctgaaagattttataactttctagacaaaaataaagagatgccaggaatagagcttttaagaagaataatcgattatggtattaaaaatcaagtttttgatgcagactcatggatatttgagcttacagattctattataggagataattatccggtgccagatcggatgctaatacatattgaaaaaattgttcatgagtatcttgtctcagagctttgttacaataaaccgcctgtaggtagatttaacatttttgcagttgaaggggctactgcagcaatgtgttatatattcgatagcttaatcgcaaatgaattgctggctcctggagacaaaataggactaatggttccagtttttacaccttatttggaaataccacatttgccgcgttataactttgaaattatacatattgaagcgatagaacttacagaggatggaactcatacgtggcaatacccagaatcagaacttaataagcttaaagattgtagtattaaggctctatttgttgttaatccaagtaatcctccttctgtagcaattaaaccagagagcgttaagcagttaataaatatagtagaaaattataaccctaatttaatgattatttcagatgatgtctacagtacttttgtaaataattatagatctctaatggcagacttgccatataatacgataggtgtttattctttttcaaaatattttggagtaactggatggagacttggaacaatatcactttattcagagaatgtctttgataaattattaaagaatttaccagaagataaaaaggttgagttaaggcagcggtatggagatctttcaacgactccagatgatataaaatttatagatagaattgtagcagacagccgacaagtagctcttaatcacacggcaggattatcaactccacagcaagttcaaatggccttcttttgtgcgtttgctctattagacgaagaaaacatatataaagaacaaaccaaagatatttgcaaacgaagacaaaaacttttgtttaatggcctcggattagatttaagagaagatccgtatgatgctgcatattatacagaatttgatttattagaatgggctacttgctattatggaagtgaatttggtgaatatcttcaaattaattataagccggtagatattttatacaaattagctgaggaatcagctatagttctattaagtggtggagggtttaaaggaccagagtggtcaattagaatatctctggctaatcttaatgatgatgcatattcaaggattggagaggcacttcataaaattttagatgaatatgttaattcatggagaaatcaaggaaataagtcataagaaagctaagaagataactagtattaatttagttatctttttagctttcttactgtttctttaattcaaaaagtgctccacctaatagagcatagactttttcatcatctgtaataaaaagagttgcagaatgagttgtcttttcaggctcagttatttttatatatttaattttatcacctgaaataccaagatttttgaaagtatcattataagtgctataaaattctgtagctgtaattgttccttcattaatagttggatcagatacagctccgtaaattgaggaaatcttatctttctctatagtaaatttttgacctatacatagagaaatagtagactcacttagagtagtttttatattggaaggtatatgcttttcaatagtccaagtaccatatagacttttataatatgaagagtcttggctttcattatttgataaatcactattgcctttgggcggattactattggaatatctgaaaaaagaaaatgcagataggagtactataaacaatattattactaatatatataagctttttgatctagggtttttcatttttgttatcctccttgcggatattttattatatagtttttttcacattgaaaaaataattctgattttattgataaaaataactttaatttttaatttatttttgtaaagaggatacaacctgttgcttagaaccttcagcgatattttcagagcttttcggaatcaaaatatttatgatttccataagttatcacataaatctagttttaaagttgtttatagttatagataaacaacttaagaatttgatgtatactttgcaataaataccatattagaaagtagaaacatttttatgcagcaggcattgaaaatgagctgttaaaagctcttaattgtaggttgttcaactaatgcttgtcacaatgaaattgggagcaagcattagtggtgcaacctgcaatttagtactttcagcgaaattttcatagtcctgtgaaataacaatgtttttactttcggcagattattgcataagtctaagttatatattgtttatctatatctatatttaagcagttaaagattaatttaccaagaaaattgcaaactataaatgcatctttcttaaacaatcttccagccaatctatgtatgatttctctctcataatggctccatttaatattatataatctccgaaacctggagaggatactgctgaaatgtcttttatttttaaaagttcatccattgaattttcaaggtattccaatctttcaatgtgtttggttagtgtatttttaaactgctttattaaagtatcgtgatccatctcatcacaaaaataagctttaagtttaaaaatatcttttggggttggctctaaaggatcgtcttttgaaagccatttctgcaatgactttcgccctttttcagttatagtatataactttttttctaacttttctccttgtataacagtctcatatgaaattaatccttcatcggttaatttttttaattcggggtatatttgactatgcttagcataccaaaattcaactaaaccagaattaaattcttttgttatatcatatccggttaaaggatttctattaataagtcctaaaatagcatattttaaagttctcatacatgcacctctaatatttctgtagcttatttgcttgagtttatccaatgacaattttagcatagtaaaatataaagtgaaatagaaaaatattaactgttaaacatgtcaatattgacatgtttgttttttcagtattataatatagttaaataaggaaattaatgtaatcagataattaaacgtttaaatattataggaggaaatttatgaataagtataaaaagctatttgaacctattaaaattggtaactgtgagataaaaaatcgttttgcattagcgccaatgggaccacttggactagctgatagcgaaggtggatttaatcaaaggggaattgattactatactgaaagagctaaaggtgggacaggcctaattatcactggagttacttttgtggataatgaagtagaagaacatggtatgccaagtactccatgtcctacacataacccagtacattttgttagaacaagcaaagaaatgactgaaaggatacatgcatataatgcaaaagtatttttacaaatgtcaggtggatttggaagggttacaattcctactaatcttggagaatatccaccagttgcaccatcagcaattcaacatagatggcttgataaaatatgtcgtgaacttacaatagatgaaattaaatctatagttaaaaaatttggagatggggcttataacgcaaagagagcaggatttgatggtgtacaaattcatgctgtacatgaaggttatttaatagatcaatttgctatttcattatttaatcatagaactgatgaatatggtggaagcctagaaaatagacttagatttgcacgtgaaatagtagaagaaattaaagatagatgtggagaggatttccctgtaactcttagatattctccaaagagttttattaaagatttaagagatggagcacttccaggagaagaatttattgaaaaaggaagagatttagaagaaggtattgaagctgctaagttacttgtatcctatggatatgattcattagatacagatgttggatcttatgattcatggtggtggagtcacccaccaatgtatcaagaaaaggggttatacagaccatatgctaaattaatgaaagaaactgttgatgttccagtaatatgtgctggaagaatggataatcctgatatggctcttgaggcaattgaaaatggaacttgtgatattgtgagtcttggaaggccacttcttgcagatcctgattatgtaaataaattaagggcaaataagtgtaattcaattagaccttgtatatcatgtcaagaaggatgtatgggacgtcttcaaaattatgctatgcttaactgtgcggtaaatccacaagcatgtaaagaaaaggacaatgcattaactcctatattaggaaagaaaaaagtacttatagttggtggtggagttgcaggttgtgaagcagcaagggttttagctcttagagggcatgaaccagtactttatgaaaagactgatagattaggtggaaatcttataccaggaggttcgccagactttaaagaagatgatattgcattagctaactggtatgcaaatacattgaaggaactaaatgtagaagttaatttaaatagcgaaattacaaaagaacaaatactaagttataaggcagattctgtgataatagcaacaggatctactcctaaagtattttcattgggagatgatgagaaagtatttacagcagcagatgtattattaggaaagaaagagtcaggtaataatactgtagtagttggtggtggattagttggctgtgaattagcacttcatctagctaagaagggtaagaaagttactatagtagaagcgttgcataagattctttcactaaatgggcctttgtgttctgcaaatagtgaaatgcttgaaagattaataccatttaacagtattgaagtaaaagtaaattcaaaagttaaagcttataaggatggaaatcttgagatagaaacagaaaatggagtagaaaaaatcaaatgtgattcagtaatactttcagtaggatataaagaagaaaattctttatatagagaattggaatttgagattccagaaatttatctattaggagatgcacgtaaggtttcgaatattatgtatgctatctgggatgcatatgaggtcacaaatcatatataattaatctaatgttagcaaagtgtcatataagctatttatatggcactttatatttagaaggtttttcatatagtattttaggagtaaattttatttacaaaatcaatattgtaatatatgtataggaattataaaaaggcagtgaatttgtatttataaatttactgtttttttttgtatagaatgtaaaaataaaaagtgatattataatgatattggaactgatttacaatattagaaggttagtttcttagtaagaaaggaacattgagaatgggaaatttactaaaaagaaaaaagaatatatcaattaaaactaagtttataataagtggattactacttggattcagcatcattttatttgcaatggcacggtatatatatggattttcaaatttctattacaagtatatttatttaacactggtaaatacactttcaagatgtttgtcattaataccattttcagtatacgaaataatattatatgctttccttatatatattcttgtaagaatattaaattatacatatctactcttttcaaaacaacattcattaaaaaaaataataataagagctacttcaaatgtgcttatatatatatcagcatttgtatttttaaatataatgactctagggataaactcattcagatcaaattttgttgaattaactggattaaaagtgcaggataattcagaagaaaaattaatagaactttgtgactatttaaaagttagattgaatgagttagatggaaagataaaaagagatgaagatggactattaaagctagattatgatgcaaaaaaagaaggaataattagtatggaacatataggagaaatttatccgtctttgcaaggtttttatccaaatccaaagccagttgttttttcaaaacttatgtcatatcaattgttggaaggagaaacaacttttaccattgaagctaattataataatgatatgcccaaatggaatgttccaagtacaatttgtcatgaattgagccatgtaagaggttttaatagtgaagatgaagcaaattatataagttttctagcatgcactaactctaaaaattatgaatatcaatatagcggatatcttatggcgtattcttactgcatgaatgatttatattatttcaatcaagaagcctttaaaagaataaataatgaactttcagataatgtgaaattagaattaaaaaatgattcgttatactggagcaattatagaggtaaaatatcaaagctgtatgataatgtatatgataagatattaaaagctggtggtcaaacagaaggaattaaaagttataatgctgtcgtgaaactactcatatcagggtataaagttcaattttaataagaaatgaccaaggagataaactttcctttggtcatttatttttttgctttttctctttttcttttccattaccgttaccattgccattattattattattattattgctattattttttcttgtttctggtgcaggttgagtaactttttgtccttggcttataatcaaatctatctttccacttttttcataagaggtaccaacagtaggagattgacttataactagaccatttgctacattatcgctgtattcataacttatatttccaagtaaaaattcattactatttataatagattcagcagtatcttgagattttccaactaatagtggtacttgcctttcttcacttggttgcaacttgtcattattttctttactagtggttcctaaagtattttcttcgatgctgctatttataggagaatctttatatcctgtacttttagagaatcctccatagaaatattcgcctaaggcaaaggcagcaatgcaaaacgcaatcatcccaattggtaaaataaattttttggatttactttttaggttgtttatatgtaaagtattagtaacgttctttaatagcacagtttcttgtattggctctttgctcataatcacagtgggatcaatttctttatgggtatcaatcatgacagttgaatcttctattaatgtgctatcaaagtctatttttaagttgggattttcttttattgagcttaaaacattagcaaattctttagctgatttaaatctatcagctggatttttttctaaggcttttagaattactaaattaatgttctcaggtatatctgaaataaaattctttggaggaataacaggctcttgtatatgcataattgctactgaaatagacgttttcccattaaaaggaacatttccagtaatcatttcatacatgacaataccaagagcatagatgtcagttctgaaatcaacgtatcctcctttagcttgctcaggtgaaaagtagtgtactgaacctataattttatttgaatttgttattgttgaagaatttggaagttttgcaattccgaagtctgttaattttgcaatgttatcatctgaaattaaaatattatcacactttatatctcgatgaattatattatttttatgagcgtatattaaagcttcagccatttgtaaagatatatttaaggtagtatcagggctgagacgtacattatcccttaatacttgttttaatgttttaccattaatatattccataacaataaaattaatattattctctgagccaatatcataaatatttactatatttggatgtgataaacttgcaattgaatttgcctctctcttaaatctgagaataaattcttcattattacttaattctgattttaatatttttacagctacaaatctatttaataaatggcattttgctttatagacaattcccataccaccttcacctattttttcaagcaactcatacctgtttataagtaatgttccaatcatatatgtccccctaaaacagttgtatatctattatatcataactaattttatatttgttttcaaataatagcaaagaaaaaagaatattattacaggaaatgtcattttgtttaaatttatgattttattttataggaaaaaatgtcgttttctttcacataaatatttattacagaatatattataaacataggaagcacattaaatattttcattaaagatccgttactgataaagcagtgcatatgtgcaataaatgcgttttaaagatactcagttgattttggagaacatatatcaacttatactttatgttgaagatatattttaatgatatatgtaactataaaaaatttaaaatgaccaagtcaatataagtaatttttatttcattttgagtttatatgcaaggagttgtatagaatggaaagatatgaaaataaatgtaagtgtactaagcatgactgcgaattatgtagtacaatcaaatcaaaaccagttaatttggaaaagcatggtgcaaaattagtaacagtaaaaataaaagtaaataatgtttgcttaggcaaaaaagtagctattgcagctattttatatgatgattgcgatagaatacttgcattcaaaggatttgtaacaatggcacatgaagatccttgcgatcgtgatgcatgtggaactattgagcgtaaaatagtgttcgtaattccagaacacgaagaatgtgatccagaaagattaagagttcgtactataggaaattatatatatccatgtgaacccaataaataggtaattataaaaaagcaattgcgggataggtaaatgaagcaaccctgcagttgctttttagtgcaaaaaattaaaaaaagatatttagatattcaagatttaggaataatagtttaaacatagtgaaaaaataccactgaataaaagtataaaaggaggtattttttatgaagatagaaggttattttagcggtataaaagcagcaaatcaagctgtagaagcattaaataaaataggcataaaagatgctgtggcagatataaatgatcattatacaaatgataacccaggacaaaacaggccaggtactgaaagcagcacaaatagtttagcaaacttaatactatctaacgataatcctacggttgatccaggttatgggccaatggcagctgcaaatccaatggtaagcggtatgggcggttttgaggaaatagctgatgtaaattataaggtgattgtaaatacagatgaaaataatgccgaaagggcaaaacaaattatagctaaagctggtggagagttagacgatcctaattttatagttcctagtgggctagaaaatataggaatggatgatctagtcaccaacatgataaatgaaatgaataacatcacactctaaaggtctttaaatagaaaaataaaaatctaaaacttagaatgttggtaatattttaaataatatcatttattttaatataaaactttaggagtgtattttttataatgcaatatcttaaatttagtttaataatataattttaacttatatgtattcaataataaatttttatttgaagctgtgataggttaagtattcaattgatactaacttcttgtaagatgaatttactcttgcaatcaagaagttagtttttcattttactattttattcatatatttctcttgacttagagttgtctcgaaggagtaatatattattaaagaacttaatactaaattagaaataaggaagtgcattaataatgaagaattttgaattttatgctcctacgagagtgatttttggaaaggattcagaaaaacagatcggcactattataaagaatcaaaattgtaagaaagtcctagttcattttggtggaagcagtgcgaaaaagtctgggcttttagataaaatttttgaatctttaaagaaatctgaaatcgattatgttagcttaggtggagttgtacctaatcctagactctcaaaagtatatgaaggaatcaatttatgcaaaaaggaaaaggtagattttatattagctgttgggggaggcagtgttattgattcagcaaaagcaataggatatggcgtggctaatgagtgtgatgtatgggatatatatagtaaaaaagttattccaaccggctgcttacctattggggcagttttaactattgcagctgcaggaagtgaaatgagcaattcatcagttattacaaatgaagaaggatggctgaaaagaggatgtaattctgagtatgcacgttgtaaatttgcaattatgaatccggaacttacttatacattacctaaatatcagactgccagtggagctactgatatattaatgcatactatggaacgttattttacaaaagaacagagcatggagataacagatagaattagcgaaggattaatgagaacagtaattcataatgtaaaaatattaatgaaaaatcctaaagattataatgcacgtgctgaagtaatgtgggcaggaagtctttcgcataatgatttaactggatgtggttcagttggtgattggtcatgtcatcaattagaacatgaacttggaggtatgtttgatgttgcccacggagctggtttggcagcagtttggggaagctgggctaggtatgtgtacaaaagtaatataagccgttttgtacaattcgctgtaaacgtaatgggaataaccaatgacttttataatccagaaaaagttgcattagagggaatcgaagcaatggaaagtttttatcattccattgatatgccaatatcaataaaagaacttggagttaatttgacagatgatcaaattaatgaactagcttataaatgtagcttcaaagatactagaaccataggagaattccaaaaacttaatatggaagacatgaaaaaaatttatataatggctagataaaaattatttcaggaattatagtcagcgttatagatttttaaggagccaaaaagcagacaagatcagctttttggcttttttatacgttaataagtggtgataaatttttagagaatttgatcagtaaacatgataagactcaacttagacaaaaaattgaatacaatatataatagataactattttaaaggagaataaaatgaaggttataattataggtggaggatgggcagggtgctcagccgcattagaagcagtaaaattaggtgcagaagttgagttatatgagagaactgacttgctacttggagtaggaaatgttgggggaataatgaggaataatggaagatatactgctgcagaagagcttataaatcttggcgcaggtgatttcataagaattatggattcaatagcaattcataagaatatagatttcccagaacacaaacatgcatggctatgtgatataggtaaagctgagcctattgttcgaagatatttaatagaatgtggagttaaaatatttctgcaaagtagaataacagatgtaaatatgaaagacaataaaataaaatcattggtattatttaataaagatattataaatggagatgtatttgtagaaactacaggctcaacaggatcaatgcctaattgtgtgaagtatggaaatggatgcgtcatgtgtacattaagatgtcctagctttggcgcaagagttagtataagcagcagagcaggagtaaatgacttagtaggagaaagagcaaatggaatgaagggtgcaatgagcggatcttgtgaattccctagagaatctttatcaaaagacataataaaagaattagagaaaaatggggttgtagttattcctatacctaaggaagatgtacatttagaaaagttagaacaaaaggtatgtcagcaatatgcgaccttagaatttgcagagaatattatattattagatacaggacgcgtaaagcttatgacatctcactatccactagataaattaaggaaaataaaaggattagaaaatgtagtttatatagatccactagttggaagtaatggtaattcaattagatatttatgtgctgcgcctagaaataattcaatgcaagtaaatggagttgaaaatttattttgtggaggtgaaaaaagtggattctttgtaggtcatactgaggctatgactacagggactttagcaggttataatgcagttcaatatttggagaaaaagcctttattagaattgccaagagagcttgctacaggtgatattattgcatatgcaaatgacaaagttaaggaaggaaaaatgagtgaaagatatacattttcaggagcagaatattttgaaaggatgaaagatttaggattgtatagtatagataatgatgaaataagatcaagagttaaaaaactaaatctaacaaatatattttcaaagcaatgtaaaaactaagtttctataattaaaaatattaaattttggggagcttttattagcttcccaataattatgaatgaaaataagaatataaattctatgaattcatgttataataaatataaaatatggtaatgtacataaagatttatttttaaggaataataacgcaatgttaagtaaaaataaataagtaattattaataataattacgtcctaaataaagagagataatttatttaattaaaacgttatatccaattagtgtaatacattgttatggaggatattatgaaaagtatagaaaaaggaaaaaaactatttttatccatggtaatagcaatattagctgtaagtatagttacaactgcatttagctattttatgcaaggaaacataggaataatttcaggactaactaggactgtagtagaagctattctcttatattttatatttaaaggaaaagcatgggctaagattataatgataattttgcttataattgtcattttagcggcagttgcagcaattatgatttcgcctaatataatgattactattttaatgatagtgtatatctttagcgtatatattataggaatatcgccaagtgttaaagaatatttaaagtcaattaataataagtaaagaaataaataaagaggtattttgatttttatcaaagtgcctctttatttattgccttaagtaatatgggtagaattcttttatgtagaatacatccgaatcattttatagcaaagattactaattgtaaaaccagcttaactttattaagtttctatttataaataaataatataaataagtttttgtattatttaataaaatttaattaaaataaaattatgatataataggcataaaactcttatagttttatataaaattggggtgataatatgtcaattactgtagggaaattatttggaaatggggctgttttatatcaaatgaaactgctagcaggacagaaaggtcttaataatctagtggaatgggtacatattattgaaaatgatgaggtgagtgaatttcttcatggaaatgaagttgtccttacgtcaggcattctaaatgatggtgatggatggttgttagaatatacaaaaaaactatatgctgctcgggcaagcgcttttgttgtaaatattgggccatacaccaagttaatacctaacgatgttatagaatattgtaaccaaataaaaatgcctctttatactattccatgggaaacaagaatggtagatttaacacggaatatatgttatcgaataatgcaaagtgagcaagtagaaataagtatagcaagtacgattaagaatattatatttaaaacaggtgatatagaaacattaattttacagatggagagatatgggtatttgagagacagtcatttctgctttatagtcatgtcctttgaacacaaagaagacaatcaattagaatttgatatgaataaaattaaaatgtattcagaaagattagctagaagtattcatgaattatatatttcattttcatataaagattcttgggttctggctcttgtgaattatggaaattacgatgtcactaattttgttgatactttttttaagaattggaatgaaccttcatggaaggttcatatgggaataagtgaaaataaagcaggcattaaaatgcaggcggagaattttaataatgcttttacagcaatgacgatggcaaaaaaacaaggcaaagaaatggtgttttatgataaattagatattcataaattgcttttaaatgctaaggataaagaagtgcttaaagaatattacaaggatactctaggtaagttagaaaaatatgataaggaaaataacactgatttaatgagcttcttatatatgtttttacagaacaacggtagtcaaagtcttgttgctgaaaaacaatatattcataggaacacagtaaataatcagcttaaaaagattgaaaagattactggatataatccatcaaatttagaagaaaaactacgattttatttaggtttttttgtgaaggatgttatgtagggcaacttgggacttgttatttatattcatgtgcctaaatgtgcagttgcacaaataaacttagtcacttattcattgatataacagttttactagtatataataaaaacaacttaaaggaaaaacgaatttaatagagataacagcaacggagcttgttcacttgaataagttccgtttttttatttgaggaaaatattaaatgtatatgagggagtgtataaagatgaatggtgaagaaattaggagtactttaaaagaatataatttacaatcatggagcaaacaaagaaatttaaatcctatttcagttgaaaaagctgatggtatttacttttgggattatgatggaaatagatattcagatatgtcgtcacaacttgttaatatgaatttaggttttggaaataaagcgattggagatgcaataaaagaacaagtagataaatattgttttgtagggccatcttatggagccgaatctagagccaagcttgcaaagaagatcattgaattaatgcctgataatatgggcaaggtatttttcacaaatgcaggtgcagaatcaaatgagaatgctgtaaagatagcaagaatgttcacaggtaagacaaaggtgttcagccgttatagaagttatcacggatcttcgtttggtgctggtaatttaacaggtgaacctagaagatatcaattagaacctggtattccaggattcgtaaaattctttgatccatatatttatagagaaccaatagaattcgaatcagaagaagctgcaacaaaatattacttggccaagttgagagaacaaataatttatgaaggacctgatagtgtggctgcaatagttttagagactataacaggttcaaatggagttatcattccgccaaaaggatatcttccaggagttagagctttatgtgatgaatttaaaatcttaatgatttgtgatgaagttatgacaggctggggcagaacgggtagaatgtttggctttgagaattttgatgtaaaaccagatatagtaacttttgcaaaaggtgttacttgtggatatgttcaacttggtggagttgtagtaagtaaagaaatagcagcttactttgatgataatttattatcttgcggactaacttatagtggacatcccctagcttgtgcagcaggtgtagcgtgtataaactattatgaagaagcaggtatactaaaaaatgttaacgaagtaggtagtgtacttggtgaaaaactagaagagatgaaagcttctcacccatcagttggagatgtgaggtatattggattattttcagcagtggaattagtaaaggataaaggaagcaaggaacccttagtaccatatggaaaggatccagaaggagttatggggaaaattttaggattattaaaggaaagaaagtttatgacatatactcatgagaacatgatacttgttgcccctccactaataattactaaggagcaattagaagaagagttagctaaattagacgaagtacttggaattgtagacaaacaatttatctagatgaggtgagaaaatggcatatgagtttagtttaccaagacgtacgattattggagataacgcattagaatcaagcgagagcttgataaaatcccttgggaaaaaagcatttattgtatctggaaaaaatgtaactagaattggaacagttaaagttttgacagactgtttagataacttaggaattgaatatgaaatttttaatgatattattggagagccaaccgatttaatgattgaaagtggagtaaaagcctataaaaacgctaaatgtgatttctgcatagcaattggaggaggaagtccattagatagcggtaaagctattgctgccatgacaaaattagaaggttcaatatctgattacatgggaaaaacaattgaaggagattttccaccattggttttgattccaactacagcaggaacaggttcagaagctaccaaatttacggttattacagattcaaagaggaatataaaaatgcttctaaagggagaagcattactacctgatttggcagtgattgattcaaaattctcaatgacatcacctaaaagcgtaacagcggcaacgggcatggatgcgttaactcatgcagtagaagcgtatacatcaagaaaagcaaattcactaacagatacctttgcattatctgcaatcaaaagaatttttgagtttttaccattggtttataaagatggtgaaaataaaaaggctagagaagaaatggccattgctgcatatgaagctggtgtatgcataaataattcttcagttaccttggtgcatggcatgagcagaccaattggagctaattttcatgttgctcatggaatttcaaatgctatgcttataaaggaatgtttatcttatgttttagatggaagctatgaacgttttggtacaataggtagagcaattaatgtagcagacgataagaaaagtgataaggaagcagcagaagcttttctagaaaaattaacagagttatgtaacatatgtgaaataccaactttaaaagagtatggaattaataaagaagaattcaataaggtagtagataagatggcgcaagatgctatgaacagtggaagtccatcgaatactataaaagaagttaaaaaggaagacttattaactatatacagtagattatggtaaatataaaataattgcaacggtgcaaaacaaatagttttgtaccgttttttgtttaaaaggaggcgtaaatcaatgagtatgttgaatgaaatagatacagaatttgaaagcagaaatgtttttaggacaagagaagaaaaagtagaaattaaaattgaagatttaagtatggtttataaagataagaatgggggcgaaccagtaacagcacttaagaatgttaatttagaaattaaagaaggagaatttatttcattactaggtccttctggttgcggaaagacaacgttacttcgtattatagctgatctattgcaaccttcttcaggaaaagtgatagtacgaggacaaagtccaagagaaataagacttcaaaagaaatatggcatcgtatttcaaaatccagttctatacgattggagaacagtaagaagaaatgtttgtatgccaatggagcttctaggaatgaagaagcaggatcgtacttcaagagttacggaaatgcttgatctagtaggacttactaactttggtacgcattatccttatgaattaagtggagggatgcagcaaagggttggtatagcaagagcattagccattaatccggaaatacttcttatggatgaaccattctcagctttagacgaatttacacgtgaaaagcttcatgaagatcttttagaaatatggacaaagaccaaaaagacagtagtttttgtaacccataatatttcagaagcagtatttttatcggataaagttgtggttttatctccacatccaggacgtgtttctgctgtgattgatattgacataccaagaccaagaaatatggaatcaaagcagtcaaaacaattttatgattatataaccaaaataagaaatagctttgagggggtatgattatgattagcaggaaagagaaatataaagttaatctagtttgggctataggcatctttatagcttgggaattagtagctttctttctagaacaagtgatgcatgatccaatggctggagcaaaattgccttatccacatagtgtcatcatatcaatagcagaaaatttcactgatttaatgagcgcagctggacttactttttcaagagctgtatttgggtttgcacttggagctgcaataggatttgttttagcaataattatgagtttatcgaaaatagcagaaaaaatatcattaccttatttaataatatcacaaatgatacctgttttagggttagctcctataatctttactttagtcagggatatgaatacttctagaatagtaattgcagcatatatcacatttttcccagtttcagtaaatatgcttagtggattaaatagtgtagaaagcgataaaaaagaattgctatactcatatgctgcaaaaaagaaaagcatatattataagcttatgattccatattcaatgccatatttatttgctggtttaaaaatagcagcaccaatgtcaataacagcatctatcttagttgacatgttaggttcaagtggtggaattggagtgaaacttttgtactcgttatactcaggaacaaaagatgtattctggggatcagtagttaccagcgctttaatggggattttgagttattttatagtaatattattcgaaaaaatttgtatgccttggagaaaacagactacatagagaggtgattttatgaatgaaaaaattaaaaatgtcttatggcccttaggttttgggatattaatgataatcgcatggcaagttggtatcattcatgatgcattaggttttaaaccctttcaattaccagtaccatcacaaattattaaaactttaagtgataatttttctaaagctctaactgacacgatgattacagtttcaggggcattggcaggacttgctttaggatgcataattggatttattgtcgcagtgatagctacgcagtttccaaagtggggatatacaggacttagtgtaatagcagcatttaatgcaattccaatagttgcattatcgcctattatgaatcgttggtttacaagtggttttgcacaaaaggttggtgttgtaacggttgtatgtatgtcagctatggcaattaactcatataggggattaaatgatttaaaaccatttgcaaaagatttattagagtcatatgcagcaccagaaaaaattatatttttcaagcttcgtttacctaattgtcttccgagtgttttaactgcattaaaaattaatgtggcagcagcaataatggcggctatgataagtgaatactttgcagcatcaacttcaggtattggttttggaattaaagataatttaagaaaaggaatgatggccatggggtggtcctatatagtaatggcagcattagttgggattgttttatacttaattattttattaatagaacgtagaaccataaaatggcatgcatcacaaagataataccaactttaaaatagaaaagtttagtttaacctaatatactatttgctttataagcaaaattgaaagtcaccgatatctcttagaatttcaagagaacacacagatggaatgtataagataaataatatttatttaataaggaggaatttattatgaaaaagaagttattagctttagggttagctgtattaatgatggggacgatgcttataggatgtggatcaaaaacatcagaaacaacagcgaaagatgcaactaaatcagaggatactacaaagaaggatggggagttagaaaaagtaacacttcaattaaaatggcttccgcaatcacaatttatgggatattacgtagcagcagcaaaaggttactataaagatgaaggaatagatattcaaattcttccaggaggaagtgacattattccagagcaaaatgtttataatggtgtagccaatataggggtaacttgggtttcaagtttaatgacttaccaagctcaagggtatgatttacaagaaatcgctcaagtatttcaaaaatcaggcatgttactagtatctaaaaaagaaaaaggtattaattcgccaaaagatttagctggtaaaaaagtaggtaactggtttggtggtaatgaatatgaacttcttgctctgctttcaaaatacaatttagataaagacaaagacctaaaacttgtacaacaagactttacaatggatcaattaaaagaaggatcagttgatgcagcatcagcaatgacttataacgaatttggtttattacttgaaggcggcatgaagaaagaggatttaaatgtaattgatatgaacaatgaaagtgttgcaatgatggaagattgtttatttgtaaactctgaatgggcaggtaagaataaagatttattagttcgtttcttaaaagcatctataaaaggttggaaagatgctgtccaagacccagaagcagcaggaaaaacagtttatgatgtagataaatcagtttcattagatcaccaagtttatatggcgaaagaagttgctaaacttgtagcacctcaaggatttgatacttcaaaaattggacaaatagatatgaatgcaattaagcaaacaggggatttcttaaaactttataataaagatttagctaaaactccagtggtagacgatacaacattcacttcaaagtattgggaagaagcaacaaaataatatgataaaaattgattcatgtgtggttaaatccacacagaatcatcttaaaatttatataacaaaaatcttaatttaagaaagtaatttatcacaaaagaactaatttattaaaaatacaaatatattaggaagcttaaatcaaaagtataacaaaaagcagaagtattaaagagaaaattattaactaaattagttatttagatattaaggatatatataaatggaaggagaatacttatggatttaattattaagaatggaactattgtaacaccattagaatcttatgtagctgaccttgctgtaaaaggtggaaagattgtagcgattggaacaggtttttcagaagaaggtgcaagtgttgtagatgctaaaggcaagttaatattaccaggggctatagacgcacatactcatttagctatgccgtttggaggtactgtttcagctgacagctatcttgccggaacacgggcagctgcttgcggaggtgttacaacagtatttgattatccgatgcaaagaaaaggcagtggaataattgaaaccattgaaacaagaaaagaaatgtgtgatccagaggcttgcgtagactatgcatttcattgtattataactgatttaaatgaagaaagtatcttagatgaatttcaagatgcagttgaatatggagtacctagttttaaatgtttcttagtttataaaaaagagggaatgatggtggatgatgcgactttagtgaaaatactattgaaggctaaagaaactggggctatgacaaacatccatgctgaaaatcccgatttgattgacttaaatattgaaaacttcttaaaagaaggaaaaacttcagcatggtatcactacttaagcagaccagaatttgttgaagcggaggcagataaaagggcagtgcatttagctaaatccataggagcgccactatatttagttcatatggcagataaggaaggattggaaactgctattgaagctaaaagagaaggtcatgatatatatattgaaacatgtccacaatatttggaatttacgtgtgatgtttataaaagagaagatggcagaaattttgtatgttcaccaccaatgaaagggcaagaaagccaagatgcactttggaaagctattaaatcaggagatattgatactgtagctacagaccactgcccattccaaagctatgaaaaggactgggggaaagatgattttacgaagattccaaatgggtgtgcaggtgtagaaaatttatatccatatatgctttcagcagcaaatgaaggaaaaataacatttaatagagcggtagaattatgttcatttaatccagctaaaatatttggatgcacagaaaaaggttctctaacagttggaaaagatgcagacattgtaatttatgatccaaataaagactttacaatttcggtagagaatatgcattcagattatgatcatacaatttgggaaggtaaaactcttcatggatatccagtacaaacttatgtgcgtggaaatttagtttatgataatggtgaattcgttggaaaagcaggatttggacaatttgtaaaacgagtaggaagaaagtaaattggaacttggctttggtgatatttagtaccttgactgtagttcaagctatctaggattatgataatgatgttatctacagattaagaataatgagagttacagaggctaaacatcagataaatgataatttaggaggaatggaaatgagtagtttattttataaagatatttcaacaaatgaatatgtgtcaggatgtttgttatgtgatgaagcaccttgtcgcaaagcttgtccccactcccttgaagtggatactattattcgctctttaaggtttgaaaataaggctggggcagtaaataaactgcccaatctacttccttgtgacacatgtgaagaaaagccatgtaaggaggcttgcttaaaaggaaaaattaatgaatcagtaccaattgacaaagttatgaaagcaatatcaactgaatctagagttaaagaaaatgaagttgatttagcaatagatttctgtggtgtgaagtgtgaaaatccatttttcctttcatcatcagtagttggaagtaattacgaaatggtagctaaagcatttgaaatgggctgggcaggggtagcatttaagactattggtatgtttgtacccaaggaggtttcaccaaggtttactgctttaagtaaagaaagtgttccatttgttggttttaaaaatatagagcagatttcagatcacactctagaagagaatatagaattcttaaaaagattgaaaaaagactatccaagcaaaattattgttgcatcaattatggggcaaaatgaagaagaatggactaaattggccaagctaatgacagaggcaggagcagatattattgaatgtaatttctcatgtccacatatgacaagtaaaggcgtaggttcagatgttggacaaaatccagatttggtagcactatatactaaagctactagaaagggaacaaatttacctatacttgcgaagatgacacctaatattggaaatatggaaataccagcaatggctgcaatggaggcaggagcaacagggattgcagcaattaatacaattaagagtattatgaatttaaacttagaaaactttgaatcagaacctaatgttgaaggtaagactagcgtaggaggatactcaggaaaagcagtaaaaccaattgctttacgatttattcatgatatgaaagcttgtgaagaactaaaagatgcgccaataagtgggatgggcggcattgagacctggaaagatgcagctgaatttatggccttaggatgtgaaaatttgcaaataacaacgtctgtaatgcaatatggctatagaattatcgatgatttaattaatgggatgaaattgtacttaagttcacaaggttataaaaatatatctgaaattgttggtagtgctttacctaatattgtgccaacagataaacttgatagagacagtatttgttatccaaggtttgataggcaaaagtgcataggatgtggacgatgttacttatcatgttatgatggtggtcatcaagcaattaaggtagatataaatacaaaaatgccaattttgttagtagataaatgtgtaggctgtcaattatgcagtactgtatgtcctgcaagagcagtagaaccaggaaagagagtgaaaaaataattacaatactaaattttaagggggatattcatatgttaacttgtaataaagaaaggcttcaagacaaaatcacaacatttagtaaattcggagatacaggtaaaggaggaatcacaaggttgtctttatcacctgctgctttagaagcaagagaggaattttgcaaaagatgcaaagcacttggtatggagataaaaaccgacgatatggcgaacatatacgcaaccattccgggagaggaaaagttacctgctattatgatgggatctcatgctgattcagttaaacaaggtggtaattatgatggtattttgggagttcttactggattagaagttgcagaaactatagtaactgaaaaaatagctcataaacatccaataacagttgttatatggactaatgaagaaggggcacgctttgaaccagcaatgatgtcatcaggtgttattacaggaaaatttgataaagatgttatgttagcatccaaggatgctgaaggagttacatttaaggaagcattagaagccagtggatatatgggaaaaatagaaaatagaatgaatccagaaaaatacagggcactagttgaattacatgttgaacaaggacctgttttagaagatgaaaaaattgatataggagtagttgaaggtgtttgcggaatgataaattatgaatttacatttacagggcaagcagatcatgctggaacaactccaatgaaatatagaaaagatgctctatatgcggctgtaaaaactattcaatatcttcatgatgaacttgacaagcttgatagtaagcttgtatatacaacaggaaagatttcagctcatccaaatatccatacagttattcctgattgtgttaaatttactttggatgcaaggcatcaagatccagaagtaattaatcaggttcttgaaataattaaagctattcctaaagttgttgaaaaatgtgaaacaagttatgaaaaagcttgggcaagaaatacagttcatttttatactgagtttgtagattacgttgaaaaaaatgcaaaagaatttggatattcaacaaaaagaatgtatagcggtcctggacatgatgcacaatttattacagatatcattccaactacaatgatctttgttccaagtgaaaagggacacagtcattgcgaaaaagaatttacaccacttgaaaactgtttaaagggtgcaaatgttttgttgaaaacagtattagatattgataataattaatttttataaaattaattaaaaacaatttcatgacggttatgccatgaaattgtttttatatttacaattaaaaaatagtataattatactattttttactgatataacatctatatatgattgtttgttccaggctctgaaatatttttaagagcaacttcagcattatcttgtagatttggttcttgtgaaatatcaccaagagaaacgataccgataacactgttattttctacaataggtaatcttcttatttgatgtctgctcattagccttactgcatcatgaacatccatatcaggacttcctgtaacaggatttgaagtcatataatcacatatcttttgttgatctgcacttgcacctgatgctacgcaatccaaagcaatatctctatctgtaatcattccaactaatttgtttgagttatcacaaacaggtattgcgcccacgtcaaattgtctcatcatttgagcagctctttcaatagaatcttctgaatttaaactcactatatcttttgacattacatcttttatttgcataatgatcacctccaaaaatatatttccctatgaatatgttttttattattaaaatttcttagctaataaaaatttagaatgaatagatttatcgaaatacatatgttaattcttgaaataaaaaatgcagaaaaagcatctattttttaagagaggtgaaatattattaaattttaattaataggataaagttaacatttaaaatgttataatattgtagagtaatattacttaatactttcacgctataaaaagtgaaaaagagaagtaggaggataaaatgaataatattgtgtttcttaatgcaagcagaataaactttgatggacaacttgatttttcatcgctagataatttaggtaaagtgactaaatatgaagatagcagcaatgatgaaatcttagaacgggtaaaagaacaaaatattgtaattacaaaggaacttacaattagcaaggagttaatagaaaagtttccatccagtgttaaattaatttgtgaggctggtactgggtataataatattgacattatagcagcgagagaaaaaggtatatctgtatgcaatgtaccaggatatagcagcgaagcggttgcacaactagtaattacatttattctaaatttaagttcatcattagcgcagcagcaaagaatgattgaaaataaaaattacagtaattttactaaatatcttcaggttcctcatatagaaatacaaaataaaacacttggagttataggtgctggatctataggaatacaagtcatgaatgtagctaaagcattgggaatgaaaatacttgtatacagtagaagctataaagatttaggagattcaaatatcaaatttgtcagccttgaagaacttctaaaagaaagtgattttgttacaatacattgtccacttacaacagaaacaaggtatcttattgataagtctagattagatcttatgaaatcgtcatcatttattataaatacatctagaggagccattataaaggaaactgatttaattgaagctttgaataataaaaagattgcaggtgctgcacttgacgttcaagatccagaacctccagaattaaataatccactttttaacatggagaatgtcattcttactccacatataggttggaaatgttttgagtctaggcaaaggcttataaatttattagcaaataatatagaagcttttattaagaaagaacctgttaatattattgtttaagattaagtatcaagcaataaggatatttttgaatttacaatagattcactaggtcttatatgacaaaaactatatcccagcaattatttaataataattgttgggatatatactatctgtttattgctacttagaagattagtgaggctatttgctcatctatttgctctacatattttaaccatctcaccatggtctccaatccagcatttaattccaggatattttgcattaagataatcatagaacaatataggattttcgctattatcatcaaacatttcatagtgccctggaacgaccaaattcggtttaatagttccagccaaatcaacggcttcttggtaagttatatttcctattatattttccgtatatcttttagcatctcgtccattgataggaagaaatataatgtcaaagttatcccactgctttaattttgagaagataccatcatacatacatgtatcaccagaatggtatacagtacatccatttccctcaattatataacctaagtatggataatgcccggaggaatcttgatctaaaaactcatgagctgaaggaattgcagatatctttaagtctttttctgaaattgataatccatcatccagacctataaatctatttttaggtatttttaagtcatctgaaagtttattgatatgaagctttggcactacaaactttgcgttgggtgaactaatagataattggtgccatacatctcgatcaatatggtcaggatgatcatgagtgccaattataaaatctgcatttacaatttccgctggttttaatagtggaggaatctttctgttaggccaatccgatagaaatacgtctaaatagatagtggtttcagctatcttaataacgtatcccagctgtccaagccaccagaacgcagcatctcccttttctaaaatacagtcatcaatatcttttatcaattcaattccagttttcataataacaccatccttttcgaaataattatatattaccacaaatggttcatattgtaattattttttgaatagtaagaatttgagaatagaaaaaatatgttataattagagaaatagttttgagaaaataagataatgataggatgaacgaaaatgaatctaaaagaactaaataatgaagatattgaaattatctataatgaacatatgataaaagattttccgtatggggaattaaagcctcttgatgtaatacagaaacttaataaaagaaaaaattacatatgtataggcttgtataataataatgaacttctagcatacgcacttttagcttcatcaaaatcatatttgttaattgattactatgcggtatgtaaagaacatagagatgaaggaattggaagtgaatttttaagtatactacaggagcattttagaaattatgatggaattatagtagaagtagagagagtagaatgcggacctaatgaaagcgagaaactgattaggaaaagaagaattgacttttataaaagaaacgggatgagaatgacagatatttattgtaaattatttgatatagattattgcattatgtgtttatgtaatgtagatcttgaagatctggcaatttatgcaggattaaaggatatatacaaagaaataattccaggaagcttatattcaaaatatgttgaattaagttatgtatagtttaaattcttaaaatgtaaaagttctatttttactacattgagataagagcaaaggcttattgaaaaatgtaattttaaaatatataataatattattaaacagctacctaaaccaaagctgtaaaaaaaataaagataaattaattctttcataatggctatgaagtctaatttttatactgaaaaagtatatgaattagactttttttatttctgttaattaaaaagatcaaattcttttgtaattaaaataaaatttattacaaaagaatttacagaaattaagtataaacatggaggtatttatggttaatgaaattgcagtttgtgtaaatgattttggagaggttactgaatatgagaaaaccaaatttattaaggtttttacaaagcagagaaatgaatggagagtggttaaagaattagtatttgaattctgttatacaaaggatagtaaagaaagttacttagaagttttaaatattgtgcaagagctaggaaaatgcaaagtttttgttgctaagaatttttcagatttagttcatactacattggataaaatgggattgagtttgtggaatatggatggaaatccaatatgttttctggattatatattagaacaagaaaaagaggaagagaaagtaagtaaatttataaatcattcagatataagtaatgatgggcaatttattatctcattaggtaatggagaatgtgggcgttatatattaaatcttaagaatttgcagaaggacaatataggtattacgtctaagcaagctttgaggccatttctaaatagaaaaatttttaatgagttaataatagcctgcagccatattccaaattggttagaagaagatttaacaaaattgcatcttaattttcagttttcaaagattggagaaagtgattatattgtggtaataaataattatgatggatattaggatttagattctggattcagtattaaatgcagggagggaaaaattggtggatattgaagtgcgtaataatagaaaaataaatgtaagttctttttcaaaaattatttctgaacatttaaatattgatagtaacattataagaaattatatatttgctaatataagtataagtctagcaagaagcaaagaaatgaaaaaagatattgataaaatatattatgaggatagactgaaatattataatgcggctataaatgacacttgtataaactatactactataaagcaagcaaatattgaacaagaaatatattcacgtaggattgttggggtacttatagaaggggaaacggatagtacattaagaagcaagattattaaagttcttagaaagtattatccaattatatataatgccgtaaagaagcatgataagaaaatattgaaaaataggtacatgaaaatggatttaataactaggaatatagaagcaaaatttgatgcggcagtatatctatattttgctatttatatttcaccagaaatagtcgatcaagggttcgtaatttctattctaaacgatattgaggagtttgaatctaagaattttataaatgaaaatattgggattgagcttgaaaattataagaatagaataaaggaagttaaattgctaataaagcgagaatttggcaaaatatataattttaaagatattttaagacataataatgaacatgctagaatactaggagaaactttagaggatttgtttataatcaatgggattaatatagagagtatgtttgaagactcacaatttatttgtattgagaaagttatactgccttatgtgagaatggtaaaaaatgaagactcagacataattttattttgtattattagtggaatatttatacaatcacttattaatgagtataagaaggcaagaaacttatattttaataatattgaggagtcaagtagctataaattaagcacattagaggagcagatgattgaagttaaaaaagaaaacattagcttaaaaaataaacttgattattttaataaagaaaagttaatgtatgaaaagaggctgaagtctgaattaagcaagctagataatatacataaattagaaatgaagaagaaggaagatcgaattagaattcttgagaataaattaaatgaaaaaaagattttaaaattggatttagaatatttaaaagaatatgagtttaattctgatactattcacagaaattcggattctaacaaaagattagagaaatatactatgagcaaaaaaattattataattggcggagataaggaatggagaaggcgatttagaataaaatatccagaaataagaatgttaaatggtttcaacgaaaactttgatataagaattttaaatacagctgattacatatttttttatacccaatatatgaatcattcgacgtttcatagagctatggattttattaagcttaataaatgtaaatttggatatataggaaagacgaatatagatcttgtagagggagaaattatcgaaaaaatagttacatgcgaaggaaatgacaaataatctatatatttagaaataattgattttatatatagaattatttttatactttttaggggactagttgggtatgtaattagaaaatttgaattacaaaaaaagtattggggaaaataattacaaccacactaaaggaggataaatatatggagaaaaacactaaggagtgtccaaattgcaagaaaaaaacttctaataattcaaagtcttgtagttcatgtggactcaatcttgatagcgatgaaaattatatgagagctaaagaagaaactgataatggaaatgatagttttttgagcgagttaaacaaaatagcgggaggaagcggaaaagtagaattaagattaagagatctagttgttaatgtatttaaaaagcatacaccagaagagagagaaaatacatttatttgcgggacagcgaaaacatcccctaaggaaggagagatctgttcaaagtggcctaagccttggctattttcaagagtgttttttttatttgcaataacttttgctgggctagtagcactgttaaagatttttgaaaatatattagcttatccaggcattatatttataggtgctttaataattccgttttcattgcttattttcttttgggaagtaaatgctccaagaaatattaatatatttgatgtagtaaaaatattcttttttggcggtgttttttctttgttaataacaatgattttaagtagagtagtgtatgttagaaatgtagattacattggagcaataatgatagggattattgaagaatctgccaaattcattgtagttgcatattttttaaaaggaagtaaggaaaaatatattttaaatggacttttactaggtgcagcagtgggggcaggatttgcagtttttgaaacggctggatatgcatttgcttatggatttcaaatacctacaatgatgaggataatatatactagaggaattttagcatttggaggccatattgtctgggcagcaatgtatggagctgctttggttatggtaaaggaagataataggctaaaatttaaatatataactaatataaaatttcttaaatattttattattgcagttacgctacatgcagtttgggatatgccaataagtaatacaagtaatcttccaataattcaaggaattcttacaataattgcgtggattgttatattaatattaatcagtacaggattaaaacaaatttcaagcttaagctatagtaacagagtctaatctgatcagatatagttttggaaataaaatttcaatacatattagcttttaaagttgaaggcgatgttgtttataaactaaaatattatttgttatataatttatgaagacgtctttcaggatataaagtttagtatagctatttcacacatgtaacaactgagactagtgtatcaatataggtaaagattagtatacctaagcatgatggcgaaaagtataaataattttatgaaattgggagataatttaagaagtgagttaaattaaagatgttaagataaaacacgtcgctaagagatgtaaacaaaaacaactcaagtttacaagatatttgaaatgtaaaattataagttttgtgaaaaatgttgacaatattaaatagcgatggtatgatttaattcgttactgaagaggatgaaattcaataacttaaagctaataaaacatctaagaaaacagtatgaaaagtttttaaaaaagattgttgacaaagtctgaaagcgatgatatactgagtaagctgtcagaaacgacagaagcttataagccttgtaacaacaggctttggaaagaaaaattggtctttgaaaattgaacagaatatataagtacatttaagtaaaccagcaatttttatttgagtaagctaagattaaacttttaattgagagtttgatcctggctcaggacgaacgctggcggcgtgcttaacacatgcaagtcgagcgatgaagttccttcgggaatggattagcggcggacgggtgagtaacacgtgggtaacctgcctcatagaggggaatagccttccgaaaggaagattaataccgcataagattgtagtgccgcatggcatagcaattaaaggagtaatccgctatgagatggacccgcgtcgcattagctagttggtgaggtaacggctcaccaaggcgacgatgcgtagccgacctgagagggtgatcggccacattgggactgagacacggcccagactcctacgggaggcagcagtggggaatattgcacaatgggggaaaccctgatgcagcaacgccgcgtgagtgatgacggtcttcggattgtaaagctctgtcttcagggacgataatgacggtacctgaggaggaagccacggctaactacgtgccagcagccgcggtaatacgtaggtggcaagcgttgtccggatttactgggcgtaaagggagcgtaggtggatatttaagtgggatgtgaaatactcgggcttaacctgggtgctgcattccaaactggatatctagagtgcaggagaggaaagtagaattcctagtgtagcggtgaaatgcgtagagattaggaagaataccagtggcgaaggcgactttctggactgtaactgacactgaggctcgaaagcgtggggagcaaacaggattagataccctggtagtccacgccgtaaacgatgaatactaggtgtaggggttgtcatgacctctgtgccgccgctaacgcattaagtattccgcctggggagtacggtcgcaagattaaaactcaaaggaattgacgggggcccgcacaagcagcggagcatgtggtttaattcgaagcaacgcgaagaaccttacctagacttgacatctcctgaattacccttaatcggggaagcccttcggggcaggaagacaggtggtgcatggttgtcgtcagctcgtgtcgtgagatgttgggttaagtcccgcaacgagcgcaacccttattgttagttgctaccatttagttgagcactctagcgagactgcccgggttaaccgggaggaaggtggggatgacgtcaaatcatcatgccccttatgtctagggctacacacgtgctacaatggctggtacagagagatgctaaaccgtgaggtggagccaaactttaaaaccagtctcagttcggattgtaggctgaaactcgcctacatgaagctggagttgctagtaatcgcgaatcagaatgtcgcggtgaatacgttcccgggccttgtacacaccgcccgtcacaccatgagagttggcaatacccaaagttcgtgagctaacgcgcaagcggggcagcgacctaaggtagggtcagcgattggggtgaagtcgtaacaaggtagccgtaggagaacctgcggctggatcacctcctttctatggagaaatctagaccaacatgatgtttggctagtacagatacattattatgtatcaaaatataaaatacttgctcaaaggttacttaagtatttgttctgttcaattttgaaagactaagtctttcaaaatgcgtagcttagtagcgataagtgcgaagaagctaaaaatttatgaaatgaagcgtactttcacgtacgtgagtgagtaaaatttgaagctgacgaagcaattgacgataataagcaagcagatgttctttgaaaattgcacatagatttaatgtatatataaaatacaacaaagccaagaataaatattctttgtgaaatgattaaaccaaattggataacgtaatttttgtagtagatactaaaatgcgtactaatttgtgaagtttaataatggctagtacgaggaaacgaaaaaattatgaaatgagcagtacttaaatgtacgcgaatgagtaatttttgaagttgacgaagtaatagacattagtaaacgaacaaaaggtcaagctacaaagggcgcatggtgaatgccttggcatcaggagccgatgaaggacgcgataagctgcgataagcttcgggtaggcgcacgcagccagagatccgaagatttccgaatgaggaaactcacatgggaaaccccatgtatcataaagtgaatacatagctttatgaaggtatacccagggaactgaaacatctaagtacctggaggaagagaaagaaaaatcgattttcttagtagcggcgagcgaaaaggaaagagcccaaaccagagatttatctctggggttgcggacagaacataacgagaaatcatagttaattgaacacaactggaaagttggaccacagtgggtaatagtcccgtaagtgaaaactatgataatcagttctgcaccagagtaccacgagacacgtgaaaccttgtgggaagcagggaggaccacctcccaaggctaaatactacctgatgaccgatagtgaagcagtaccgtgagggaaaggtgaaaagaaccccgggaggggagtgaaatagaacctgaaaccatgtgcctacaaccgatcagagcaccttatgtgtgtgatgatgtgctttttgtagaacgagccaacgagttacggtatgtagcgaggttaagtacttaaggtacggagccgaagggaaaccgagtcttaatagggcgactagttgcatgctgtagacccgaaaccgggtgacctatccatggccaggttgaagcgagggtaaaacctcgtggaggaccgaaccacgttgctgttgaaaaagcatgggatgagctgtggatagcggagaaattccaatcgaactcggatatagctggttctcctcgaaatagctttagggctagcgtcggaaaatgtgagtagtggaggtagagcactgaataggctagggggcatagcgcttaccgaaccttatcaaactccgaatgccacatactatcagtccggcagtcagactatgaaagataagttccatggtcaaaagggaaacagcccagatcgtcagctaaggtcccaaagtgtaagttaagtggaaaaggatgtgggatttctaagacaactaggatgttggcttagaagcagccactcattaaaagagtgcgtaatagctcactagtcaagagatcctgcgccgaaaatgtccggggctcaaacttaccaccgaagctacgggttcacgcttatgcgtgagcggtagaggagcgtcgtaatcgggctgaagttgtaccgtaaggagcggtggactgattacgagtgagaatgttggcattagtagcgagatgtaggcgagaatcctacaggccgaatatctaaggtttcctgagtaaagtttgtcttctcagggttagtcgggacctaaggcgaggccgaaaggcgtagtcgatggacaattggttgatattccaataccactataatcgttattatcgatggtgtgacggagaaggataggatgtgctagctattggatgctagtctaagcgtttagggagttgggattggcaaatccgttccaacaattctgaggcgtgatggggaaggttctacggaaccgaagtatctgattccatgcttccaagaaaagcatctagagagagaagtagtgcccgtaccgcaaaccgacacaggtagatgaggagagaatcctaaggccgacggaagaattgcagttaaggaactaggcaaattgaccccgtaacttcgggagaaggggtgcctgagaaatcaggccgcagagaataggcacaagcaactgtttaacaaaaacacaggtctctgctaaagcgaaagctgatgtataggggctgacgcctgcccggtgctggaaggttaaggggaacacttagtggtaacgcgaaggtgtgaacttaagccccagtaaacggcggccgtaactataacggtcctaaggtagcgaaattccttgtcaggtaagttctgacccgcacgaatggcgtaatgacttgtgcactgtctcaactgcaaatccggcgaagttgtagtgcgagtgaagatgctcgctacccgcgattggacggaaagaccccgtagagctttactgtagcttagcattgaatttcggtattgtctgtacaggataggtgggagactgggaaactagggcgtcagccttggtggagtcgttgttgggataccaccctgatagtattgaagttctaactggatgccatgaaactggtgacaggacattgttaggtgggcagtttgactggggcggtcgcctcctaaaatgtaacggaggcgcccaaaggttccctcagaacggtcggaaatcgttcgaagagtgtaaaggcagaagggagcctgactgcgacacctacaagtggagcagggacgaaagtcgggcttagtgatccggtggtacctcgtgggagggccatcgctcaacggataaaagctacctcggggataacaggctgatctcccccaagagttcacatcgacggggaggtttggcacctcgatgtcggctcgtcgcatcctggggctgaagtaggtcccaagggttgggctgttcgcccattaaagcggcacgcgagctgggttcagaacgtcgtgagacagttcggtccctatccgtcgcgggcgtaggaaatttgagaggagctgtccttagtacgagaggaccgggatggactgacctatggtgtaccagttgtttcgccagaagcatagctgggtagctaagtcgggaagggataaacgctgaaagcatctaagtgtgaagcctacctcaagatgagatttcccatagcataagctagtaagaccccttgaagactacaaggttgataggtcagaggtgtaagtatggtaacatatttagctgactgatactaataggtcgagggcttgaccaatataatcaagttgtaatatacattaatagaggaagctcgactcactggcgttccgctgagtaagttcgagtatccaaatataaaatttggactctcacttatgtgcaattttgaaagaacaaattctttcaaatagcgttccgcgatagctcaatggtggagcactcggctgttaaccgataggttggaggttcgagtcctcttcgcggagccaatatctcgtgatgatggcatagaggtaacactccttcccatttcgaacaggaaagttaaggtctatagcgccgatggtactgcatgggagactgtgtggcagagtaggacgttgcgaggtaagtattaaagatagtcataatggctgtctttttttttatcaaattttggcatggtgaatatataggtatataaaaataggaatctcatcaataatgtggaataataatggttattctgttaaaatatagatgaatatgctagaatttgtgttagtgaatacttgcatttcattatcatatgttttctaaaacatttaattaatcaaagtttattttaaaatcatcaagatacacaaaaccaataaacttataaagaattaattatattatttataacttatgtggttgaaatttcatttgagaatctatatagtaattaggtgggaattattgtaggtttaatataaatttattatgctcgctatatagcattgttaagatgaactatgataaaaataactaataattcatttacaaaggagacagatatgcctaatatttttgacggacttagaaaaatttcagataatgacatcattgaacaaattgcattacttgaaacaatgaatgtgacaaatatatcaaagccaattatacaaaaggctaagaaaagaactataagtataattaattttataggaagtaaaataggaaaaaatcgtgtgctcgaagaaccggaggtaaaagaaatatgggctttggtagacgaaaaaaaagaggaattggaaaagtgtacaagaaatgagttaaatgaaaggttgttcaatattcttgctgaaaaaattaatgataatttagagagtccaacagaggacgaagtatcaatagaggtaatagaggaagcagctaaactatataaagtgcataaaaacttaatgccaaaccataaggctgatattatttattcaaaatataatgaaaagcttagtggtaaggctaaagaatatataaatggacaagcttttgtagatttacaagaaactacaaaagatatagaagaaattataagtagtatggatgaagaacaaaaaagagaatttactcaatcagtagatgttgcaaaattgacatttcttaatgtgtggaaaaaattagataggcaacattttataagacttatatggttatgcgttaaggcttatggaggtagatttactgtaaaagaagaagaacttccgagttttgtaacaagtgaagaggaagttgaggcatttaaaagagaagaagaattaaagaagtcgcaggaagaattgttaaagttgaaaaaacaaatagaattatgcaaggataaaataaattctattgagaagagtttagagaaagaaaaacgtctattgaagaatgcgattagaagtaaagataaagctgaagaagatataatagacctaggggaaatacatattaagttagcatcagtcaagaaatcatatgaagatgaattaaaagagattaaacttaaaatggaaaatgcaccattagaggaattggactcactgatggaagaatttaaagtagttaagtttgaagaaattgatataaataataagatttcagatattaatataaaggctacatataagaaggaattgatagatgacaatgttaaagtaatatctattaaagaggaaagtataaaaaacattggaatggaatttcaacatttgaaagaggaagcgcataacttggtagacgcctataataaaatgaaaagtgatgtgagaaataaagaagaagaaaaaaagaatgaaatattcaagaaatggagtcaatttttcaacaagtttacttttaactttgataacttaggcaatatggtaagttttactagaaacgaattactaaaaatcgaacaatgtttatatgaattacattttacaaatgatccaatggctttaagcatgggagtaatagaaagtaaaggtaataagaaaaaaaaggaagaatatgaatatatagatgtaagcttcttagatggttttaaaattgagattcagtttatggtattgggaaatggagaaaagaaagtacatatagatgagatcactccagaattttaaattatctcataagttattttttacaagtatttggataaaattataattatgaaatatttgctaagaatacaagataaaataaggagataataaaatgaatagttctgaattaacattaaaagatgttaatgaaatccttgaagagcaaaaagagttttttggtactcaggccacgaagaaaatagaatttcggattaaccaattaaaaaaacttaaagaaagtataaaagattatgaaagcaaaattactgaagctttaagtcttgatttagggaaacatgaatttgaatcatatgtaacagaaataggattcatatacttgagtatagagaatacaattaataatttaaagaaatgggcaaagcctaagaaaacaaaaacaccgatatttttaaaacctggaaaaagttatatagttagtgaaccttatggaagtgtgctaataataggtccttacaattatccgtttcaactcgttattgagccgttgataggtgcaattagtgcagggaattgcatcgtaataaaaccttctgaaatttcgttaaatgtttcgaatataataactgaaatgatttcaaaaacatttgataaaaaatatataagttgcgtagaaggaagtgttaagacaaatatttcattgataaattctcaatttgactatatattctttactggaagcgttaatgttgggaagataatcatgaaagcggcagcacaaaatttgattccagtgactctagagttaggaggtaaaagtccagtaatagtggatgaaactgctaatatcaaaatttctgctcaaaggattatttggggaaagactttaaatgcagggcagacatgcgtagcacccgattatcttatggttagtaaaaatattaaaggtgagcttattaaagaaatgaaaaatgccataaaagaattctttggagataacgttaaagctagtgaatattatggtaggataataaatgataagcattttaacagaataaaaaatttaattgatagagataaaaaaggaatcctttatggaggcacttatgatgaacatgaaaggtttatagagccaacaattatagatgtatcagaatttgaatcggaaagcatgaaggaagagatatttgggcctgtacttcctattattgagtttgttaattttgatgatgttgtaatgaaaatcaaaagcatgcctaaacctctggctctttatatattcactaataataagaaaacacaagaaagagttattgaagaaataccttcaggaggcgtttgtataaatgatactttaaatcatttagcaaatagtaatttgccatttggaggtgttggaaatgcaggcataggagcttatcatggagaagagagctttaaaacattttctcatagaaaaagtgttttaaacaaaggagcaaaaataaatattaagatgctttttccaccatatagttcaaaaaatatgattttagtcaaaaaacttcttaattaaaataataaatttttattaggaagctaagttttaatgttattataaagcaaaataccgctatatcgtaggctataataatagttttattataacatacgatatattaaaggttagtagaaatatcctcatagaagaataaatttattactggtttaatgaaatatagtttgaacttttttacttataaatgatgtagtgaaaaactagagcaataacctcgaatataaatcctactgagcatactccaatccaaccgaaatattgccagcttaaaggcgctagaaatgatcctaatgatccaccaagaaaatatgaaaccataaatacagtattaattcggctacgtacttcatcaccaagctcatgtatccttgcttgattggaaacttgaccagcttgggttcctaaatctaacagtataacaccaatgattaaaccataaagtttatatcctaaaatgaaaaaacatatataggataaagtagaaaaaataatgcttattcccactgtaaatttaggagtttttttatcagcaattcttccgacaaaaggtgcggcagcagctccagcaacccctattaaaccgagcaatccagcctcacgtgttccaagattataaacgtgagaacctaataaaaaaataacagaagtccaaaatgcactgaaagctccaaacatcaatgctccatttatagatgcttctcttaaagttttctcttgtttaattagaggaaatatggagagtattagcttagcgtatggtatattggagtttggtatgcttgttgggaaaaagttttttattattattgcaaaaagtgccattaagaatgcagcacagaagtatactgatctccaaccaaaagcttgcccgacaatcccactaaatgttcttgatagtaatattcctattagaagtccactcataacattacctattatttttccacgttctgaaggttctgccaaatgcgcagcaaatggaactattagttgaggaattattgttgtaaatccaactaacagagaagcaattaataaaattacgtaattaggagaaatagcaactaatagcaaagaaataccaacaactataagcatttttataattagattacgacgttcttttatatctccaagtggaacaaatagaaataatcctatggcataacctatttgggttagagttacaataaatcctgcttgagattcggaaatattaaagtttgtagaaattagtgttagtaatggctgaacaaaatataggtttgcaactgtagccccgcaagtaatagccataattaatattataaatctgtttaatttaaaatttgatttatgagtcattttaatcctccataatactgtatagatttatgtatagatactatacatataatataaaataaaataccttgaaaaggtatcttatattttgtctttaaattggtttagaaaattatacaaaaattctttattttctctgctagcacttctcaataactcttttataataagattgtattgattgtgatagcttttatgatttttatacgccacctcacctttttctgtaagctttaatattagttttgaattactatcagaactcgcctccttaaatagataacccttattttctaatctctttatagtttgtgaaacggcacctcgcgtaatatcaagttttcttgcaatagctgaaatatgtaaaccctcattttcttttatatattgcagcatgtgtatttcggaatgatatagatttgaatctgttccaaaatttttagctttcaaatctttttcaaagaaactacatattacttccagaaatatttcactaatttctttattgtctaataatttatccataataaatattgtatagatgctgcgcagtattgtcaaaagttaaatgcaatagataatgtttcagtgtagatgataataaatataaaaatatattagttaacgtatattaattacagttgaaaagtataatgataataattttataaatttgctttagcccatatacattttaaaataaattcaaatataataggagaaattaattatgaattatactatttatgatttgatagagcgacttattgatattgagaagtatgcattggaggtatataaaaaattgaagaaaatgcaaaagaaaagaattctaaaaatattgagattattacaagagtgattagaaaggaggaaattaaacatatcaaatattatgagcaattaaaagagaaatttaactatgaacttaatgatactattgatttttacttatatgacaaagttgtaaagcttttatatgaatttaagagtcaaattagaattcctcatatagacaatgctcaggatttaataaaatattcattagaatttgagaaaaatagcataagcttacttctagatattcagggaagattacttggaaacttaaatgatgtatacaataatgtatataagattatatcaaatattatagaagaagaaaggagacatgagaaaatgtttagtgatttggttttaaaataatatttaagatataacttctaagaaatattaatatatacagtgaagtagggtaagtctattggtaaactatttctagtgtgtcagtataaataaaatttagaataatgacatatagcagagaaaagtatgaataatcttataaaattaggaaataatttaaaatgtaagtaatttagaagtgttaagataaaaaacgtcgctaagagataaaaacaaaaacagctcaagtttacaagatatttgaaatgtaaaattataagttttgtgaaaaatgttgacaatattaaatagcgatggtatgatttaattcgttgctaaagaggatgaaattcaataacttaaagctaataaaacatttaagaaaaaatgtttgaaaagtttttaaaaaaggttattgacaaagtctgaaagcggtgatatactgagtaagctgtcagaaacgacagaagcttataagccttgtaacaacaggctttggaaagaaaaattggtctttgaaaattgaacagaataagataaatacatttaagtaaaccagcaattctttatttgagtaagctaagattaaactttttccaatatggataagttcaactaacatttagctgaaggtaaacttcatctaaattaagtttcactttatatcgagagtttgatcctggctcaggacgaacgctggcggcgtgcttaacacatgcaagtcgagcgatgaagctccttcgggagtggattagcggcggacgggtgagtaacacgtgggtaacctgcctcatagaggggaatagccttccgaaaggaagattaataccgcataagattgtagtgccgcatggcatagcaattaaaggagtaatccgctatgagatggacccgcgtcgcattagctagttggtgaagtaacggctcaccaaggcgacgatgcgtagccgacctgagagggtgatcggccacattgggactgagacacggcccagactcctacgggaggcagcagtggggaatattgcacaatgggggaaaccctgatgcagcaacgccgcgtgagtgatgacggtcttcggattgtaaagctctgtcttcagggacgataatgacggtacctgaggaggaagccacggctaactacgtgccagcagccgcggtaatacgtaggtggcaagcgttgtccggatttactgggcgtaaagggagcgtaggtggatatttaagtgggatgtgaaatactcgggcttaacctgggtgctgcattccaaactggatatctagagtgcaggagaggaaagtagaattcctagtgtagcggtgaaatgcgtagagattaggaagaataccagtggcgaaggcgactttctggactgtaactgacactgaggctcgaaagcgtggggagcaaacaggattagataccctggtagtccacgccgtaaacgatgaatactaggtgtaggggttgtcatgacctctgtgccgccgctaacgcattaagtattccgcctggggagtacggtcgcaagattaaaactcaaaggaattgacgggggcccgcacaagcagcggagcatgtggtttaattcgaagcaacgcgaagaaccttacctagacttgacatctcctgaattacccttaatcggggaagcccttcggggcaggaagacaggtggtgcatggttgtcgtcagctcgtgtcgtgagatgttgggttaagtcccgcaacgagcgcaacccttattgtcagttgctaccatttagttgagcactctagcgagactgcccgggttaaccgggaggaaggtggggatgacgtcaaatcatcatgccccttatgtctagggctacacacgtgctacaatggctggtacagagagatgctaaaccgcgaggtggagccaaactttaaaaccagtctcagttcggattgtaggctgaaactcgcctacatgaagctggagttgctagtaatcgcgaatcagaatgtcgcggtgaatacgttcccgggccttgtacacaccgcccgtcacaccatgagagttggcaatacccaaagttcgtgagctaacgcgcaagcggggcagcgacctaaggtagggtcagcgattggggtgaagtcgtaacaaggtagccgtaggagaacctgcggctggatcacctcctttctatggagaaatctagatcagcatgatgtctgactagtacagatacattagtatgtatcaaaatataaaatacttgctcaaaggttacttaagtatttgttctgttcaattttgaaagactaagtctttcaaaatgcgtagcttagtagcgacaagtgcgaagaagcgaaagttttatgaaatgaagcgtacttcacgtacgtaagtgagtaaaatttgaagttgacgaagcaattgacgatataagcaagcagatgttctttgaaaattgcacatagattaatgtatataaaatacaacaaagccaagaataaatattctttgtgaaatgattaaaaacaaattggagcaatttataatatatatcgctatatactataaatgcgaaccaatttgcgcagcttattggagtttagcacgaggaagcaaaaaaattatgaaatgagcagtacttaaatgtacgcgaatgaataatttttgcagctgacgaagtgataagattcaataagcaagcaaaaggtcaagctacaaagggcgcatggtgaatgccttggcatcaggagccgatgaaggacgcgataagctgcgataagcttcgggtaggcgcacgcagccagagatccgaagatttccgaatgaggaaactcacatgggaaaccccatgtatcataaagtgaatacatagctttatgaaggtatacccagggaactgaaacatctaagtacctggaggaagagaaagaaaaatcgattttcttagtagcggcgagcgaaaaggaaagagcccaaaccagagatttatctctggggttgcggacagaacataacgagaaatcatagttaattgaacacaactggaaagttggaccacagtgggtaatagtcccgtaagtgaaaactatgataatcagttctgcaccagagtaccacgagacacgtgaaaccttgtgggaagcagggaggaccacctcccaaggctaaatactacctgatgaccgatagtgaagcagtaccgtgagggaaaggtgaaaagaaccccgggaggggagtgaaatagaacctgaaaccatgtgcctacaaccgatcagagcaccttatgtgtgtgatgatgtgctttttgtagaacgagccaacgagttacggtatgtagcgaggttaagtacttaaggtacggagccgaagggaaaccgagtcttaatagggcgactagttgcatgctgtagacccgaaaccgggtgacctatccatggccaggttgaagcgagggtaaaacctcgtggaggaccgaaccacgttgctgttgaaaaagcatgggatgagctgtggatagcggagaaattccaatcgaactcggatatagctggttctcctcgaaatagctttagggctagcgtcggaaaatgtgagtagtggaggtagagcactgaataggctagggggcatagcgcttaccgaaccttatcaaactccgaatgccacatactatcagtccggcagtcagactatgaaagataagttccatggtcaaaagggaaacagcccagatcgtcagctaaggtcccaaagtgtaagttaagtggaaaaggatgtgggatttctaagacaactaggatgttggcttagaagcagccactcattaaaagagtgcgtaatagctcactagtcaagagatcctgcgccgaaaatgtccggggctcaaacttaccaccgaagctacgggttcacgcttatgcgtgagcggtagaggagcgtcgtaatcgggctgaagtcgtaccgtaaggagcggtggactgattacgagtgagaatgttggcattagtagcgagatgtaggcgagaatcctacaggccgaatatctaaggtttcctgagtaaagtttgtcttctcagggttagtcgggacctaaggcgaggccgaaaggcgtagtcgatggacaattggttgatattccaataccactataatcgttattatcgatggtgtgacggagaaggataggatgtgctagctattggatgctagtctaagcgtttagggagttgggattggcaaatccgttccaacaattctgaggcgtgatggggaaggttctacggaaccgaagtatctgattccatgcttccaagaaaagcatctagagagagaagtagtgcccgtaccgcaaaccgacacaggtagatgaggagagaatcctaaggccgacggaagaattgcagttaaggaactaggcaaattgaccccgtaacttcgggagaaggggtgcctgagaaatcaggccgcagagaataggcacaagcaactgtttaacaaaaacacaggtctctgctaaagcgaaagctgatgtataggggctgacgcctgcccggtgctggaaggttaaggggaacacttagtggtaacgcgaaggtgtgaacttaagccccagtaaacggcggccgtaactataacggtcctaaggtagcgaaattccttgtcaggtaagttctgacccgcacgaatggcgtaatgacttgtgcactgtctcaactgcaaatccggcgaagttgtagtgcgagtgaagatgctcgctacccgcgattggacggaaagaccccgtagagctttactgtagcttagcattgaatttcggtattgtctgtacaggataggtgggagactgggaaactagggcgtcagccttggtggagtcgttgttgggataccaccctgatagtattgaagttctaactggatgccatgaaactggtgacaggacattgttaggtgggcagtttgactggggcggtcgcctcctaaaatgtaacggaggcgcccaaaggttccctcagaacggtcggaaatcgttcgaagagtgtaaaggcagaagggagcctgactgcgacacctacaagtggagcagggacgaaagtcgggcttagtgatccggtggtacctcgtgggagggccatcgctcaacggataaaagctacctcggggataacaggctgatctcccccaagagttcacatcgacggggaggtttggcacctcgatgtcggctcgtcgcatcctggggctgaagtaggtcccaagggttgggctgttcgcccattaaagcggcacgcgagctgggttcagaacgtcgtgagacagttcggtccctatccgtcgcgggcgtaggaaatttgagaggagctgtccttagtacgagaggaccgggatggactgacctatggtgtaccagttgtttcgccagaagcatagctgggtagctaagtcgggaagggataaacgctgaaagcatctaagtgtgaagcctacctcaagatgagatttcccatagcataagctagtaagaccccttgaagactacaaggttgataggtcagaggtgtaagtatggtaacatatttagctgactgatactaataggtcgagggcttgaccaatataatcaagttgtaatatacattaatagaggaagctcgactcactggcgttccgctgagtaagttcgagtatccaaatataaaatttggactctcacttatgtgcaattttgaaagaacaaattctttcaaatagcgttccgcgatagctcaatggtggagcactcggctgttaaccgataggttggaggttcgagtcctcttcgcggagccaatatctcgtgatgatggcatagaggtaacactccttcccatttcgaacaggaaagttaaggtctatagcgccgatggtactgcatgggagactgtgtggcagagtaggacgttgcgaggtaagtattaaagatagtcataatggctgtctttttttttacagaaattatgaggtaaatagtatatttattataagaaggagtgctttaattgtatataagtgaaacaaagattgtagtaagatatgcagaaacagataaaatgggaattgttcatcattctaattactttatttggtttgaggcagggagaactgatttcataaaaggaagtagtataagttacagtgaaatggaggaaaatggaatactaatacctttagctgaaagtaattgtaaatatattataggagcaaaatatgaagatgaattaatcataaaaacatgggttaagcaactaacacctgttaaggtagagtttaattattccgttatcagagaaaatgatcaaaaagaaattgctaaaggaagtacattacatgtttttgttaacaatgactttaagataattaacttaaagaaggtcaataaagaaatatttaataagttagaatctttaatataaaatatatcgtgtgaatctagaagatcatatcttaaattaagaattttagatatgatctttgttttgtagcaggtttattcattaaccaatacttttacgatttctccaatataaattgtgtgataatctttttcaggataaattttctcatcaaaagaaggattatcaaagttctcaggtttaatttctgcatgatacatttttttgcatactaccaccattttagcttctttaaagtaagtattactttcatcaaaaattggagttaaatttgctttttcaactttgttattatctcttccagaaagacttccgcaaatatttaaagcttttctgtaatcttcgctaaaaaatgataatgtaaatgtatcatttgaatctacaaattgttttgtgtaacgtcctggtctaatgtacacagtagctgagtttttaccccagaatacgcctagtcctccccaacttgcggtcatggtattaaatttattttcagtaccagctgtgattaataaccattcgtgtccgatgagagtaaatggatttatatttaggtttttaatttcaatttctttaaatgacatatgcttgcctcctataaatctttttatttaataatttatacttattttaaagctattagaataaaagttcaattacataatttttaattttatataatagcctaaatcacttttgtaggaaatcaataagtgttttagctgctattgaaaggttatttgaatttttataaatgacgcctatatatctgggaggaatctcatcttttagagggatttctaaaaggagtttattttcaagctcatcatttagaaactcttttataacagaagtaataccaagtcccatttttgcgcattcaattaaaaaatccatattgctggcttcaatatctggaatgatattgatattatgtttattaaaatagctttctatatgttctcgcgtagcgttaggattttcaagaagcataaaagatccttcagctaatgtatcatcagctgaattcaagtttagtttttctaaataagtactacttgctactaagatatcttgaattttgcaaagtcttataaaattaagattatcttggatggaagtagtaccaattatgcctaaatctaatttctcttcttgaactaattttattgtatccaaagtaggcttatttattatcttggtcttaaaataaggatattcttttataaattctcgaaatctaggtaaaaaataattttttccaatagttgtgcttacacccaaattaattgcaccagtttctttattttttagcttctccaaaatattctctccaaggttaagttcatcaaaagcattttgtatgtgatcaaataatatttttccttctggcgttagggtcacaccttttgaacttctcgaaaataaggttacattaaaagaagtttctaatgtttttattgatttacttacagcaggttgagaaacaaaaagaacttcagctgcacgggatatattcttacatttggccactgtgagaaagactttataaagatttagatcaaaaatcatagtataactcctaattatagtattcataactaatatatatttttattatacattaagacaagctaaaatagtaataagctagaaaaatatttgaatttatattaaaaatataaaagaaaggaagaatatattatgaagattggaataattggaatgggagcgataggtgggtatattgctgctatgctttgtagaagtaaagaaaatgttaatgttgtagcgtatggaaaaacattaaataaaataaagactgatggaatttcattgaaaagtgaaataaatggaagttttactgtttttcctacacttgcaacagatgattcagatgaaattggtgtagttgacattatctttgtttgcgtaaaaggatattctttaaaggcggcagcaaaagcaattttacctatggtagatgatcatactttaattattcctataattaatggggtagacggcggaaataagctatattcttacttaagaaaaggaaaagtaacagatgctattatgtcaattagctcaaaaattgaaggtgatggagttattaagcatactagccaaaatactagaatatttatatcatctaataaaaaacgccctatgtataaaagagatttagaacggatctataatgttttaactaaatcaaatattttatgtgaggtaagaagagatgcagaaatttttgcatggaataactacgtatttaattgtgcttttaatgtaactgattcatactacgatgtgaaagtaaaaggaatattagaagataaaatgaaatttgaaacattttgtaatgtagcaaaggaatgtgaagaagttgctagaagtaagggaataaatcttcatcctaatatttatgagaatgcaattaatacactaaaaggcttatctaaaaaaagtataagttcaatgcatagagatgtagtatctgggaaaaaatttgagcttgaattattttgcggcgatttatgtaggatgggaaaagatttgggagttcctaccccttatactcaaaaagcttatgaaaagctaagagttttacaacctgtgtaagatattctgaagaatatataataggtatgtaatgcattttcttaaataattaatttatagttcttgaatatgattatttagtaggaaataagattgatccttaaaaattcactagtgtgttataatattagcaaatataatagtttattattttgacttatctatggaggtgaatttttagtgtgatttaattcttgcactaagagatattatggattataaaaatagagtatgcgtaattactggaggagctttggggataggaagatgcttaacaagagaattttcaaatgttggtgctaaagttatcttcattgataaaaataaagaagcagggaatgaaaatgtagaatatataaaaagaaaaggtggagaagttgaattttttttaggagatattgcagaagaggatactttatataagtttgcagagtttataataaaaaaatataaaaatatagattaccttattaataatgcttgtattaataaaaaaggaattatttctaaatgttcatatgaagattttaattatgtactcaaagttggagtaaccgcgccatacatattaacccagttacttatgaataattttaataaaaatggtgctattgtaaatatttcatctactagagctcatatgtcacaatctgatacagaaagttatacagctgctaaagggggaattttagcattgactcatggactttctgttagtctttctaataaaatcagggtgaattcgattagcccaggttggattgatacaggtgattattatgatgaagaatatgtaccaaagtatagtgagagtgatttattgcagcatccatcaggcagaatagggaatccaaaagatatagcgagagcagctatgtttttgtgtaatgaagaaaatagctttattaatggagaaaatattaatatagatggcggaatgacaaaacttatgatatataacgatgataatggatggagatataataataattagtatttaatatgttataaaaatatttaaaatcttatgtatatagaagttattttctatatgcataagatttttttttcgtatttacatatttataattaggtgctggaataaacttcaaatataaaacatagtataaagtagagtaactaaaggaggaataagagatgaattttttacttactaagctaaatgatacttttagggataagaaagcctattttttcattgtactgataatgttttgtttaggaatatcttttgggctttacactgttaaatatatgggggaatcagataaaacggatttaacaaattatttttttagttttactaattctataggtagccatcctattaattatgggaatttattattcgaggttataaagaaaaatgtactaattattatacctatattcatattaggtttaactttttttggagctcctgtaatattaattttggacttattaaaaggttttacattagggtatactttttctttcatgataactacgtttcaaggaaaagggattggactagccttagtatctattgttcctcagaatttaatatatattccatgttttatagcattaagtgttattagtttatctatgtctgcagaaaggtttaagggaagatttttcaaacatggaaagataaaagatccttttctagatggtgtattaaataaattaattgtcatcctaatattatttgtaataggcatattagttgaaacttatatatcaccgtctctgataagatttgtggctaataaattctatttataaaacaaaagatgattttaaataaggaaggaaaaatgacgatttggtcgaatgctaatcataatcaatggtataggagttaataatgataaatagtataaataattataaaaattatttgtttgagagtggtaaaagtgagaatactatatatgcatatgtaacagatgttagtctctatctaaaattcttaaatagaaaaaagatagatttatatgaaagtgataaatcaacagttatgtcatatatacaaaatctcactaatcaaggaaaatcagaaagatctataaatagaatagttataagtttaaggaatttctattcatatttgaaaagtgaaacgttaattaaggaagttcctaaaattgaatacaagagttcaaaaaataatagaaaattgccacaaattttgaccattgaagaagtagataaaataattagaatagtggaaaaagactgctcaaaaggaattcgtgataatgcattgttggagttaatgtacgctactggaatgaaagtttcagaacttattgcattaaatgtagatgatgtcaatcttgatttgaattttgtaaaatgtacagataacaagcattatgaaaggcttattcccataggaagaagcgcttgtaaagcattaacagaatatctaagcataagatataagattgcacaatgtggtgtgtctaacctttttgtaaatttaaatggtaataagcttacaagacaaggtatttggagaattgttaaagaatactctaggaaagctggtatagataaagacgtaaatttaaacactttcagacattcatttgctgttcatcttcttcaaaatggagcaaatgttagagctgttcagaagttactcggtaatcaagtattaacatatatggatacgtactatgagataatcaataatgataaaataaactatatatacatgcatactcatccaagagcttgagaatagttatttgtacaataaattaattaaaagtattacgggggtttccacccgtttgccaccacttatcaaattggtggcaagttttatttaattacgaatttttgtatttgtagattaatatttattaaaatttacagaaggaatattccaacttttgtataattaatttatatgagaggaggcgatatttatggtcaaaaaggaaaggtgcatatggatagagtagcctttatatacaattagttatataagaggaggaaggttaatgttattaagttcaatacagaaatgctctaagtgtgatataagttttgcgtgggaatacacgactccagaaacagaaagagtattgaattttgaaggagagacttcatcaatagctagtgctaaactagtaagtgctaaagagggaaaatatgatattaaagtgaaatgtcccaaatgtaaagctttaaataagttttatattatagtgccaaggtgtaataatgagaaatgatatagagagtatacttaaataagaactctagaaatagggttctttttgacgttataaaagttcattttaaacttaaatttatatagaaaaattataaaagtaacttaataataatttttatagatgattgtggttataggtaattaatggtataatcttaaaagcaattttaattaataatagatgggggatgaattttttatgcattcagcaagcactacaatattaagtgccatactaattatagtatatttaatattatcaatagtaatatttgctttatcaatatatgcatttatattatttataaagctagctaatagaggtataagagcacttgatatttatataggagaaaaagaagggcatgctaagggagattattatataaataacaacaaatatgaaaattattaataataagttgtttttcatataaagcatggaggtataagatattaatattttatataagaccacatagcaaattgtaatttagatgttttctatgaaatttaatatattataaaacatgaacaagcacatgtatagaaatataattattttaagatacagttagaaaaattatcaattttattgagatcatatataagcaggtgagataatgaatgataaagaaattgatgatatgttttttaaaatttatgattacgaatggcttgataatcaatataaagaagtagctagaaagtcgtcagcgtatattggctttagattgtatataaagcttaaaacacttatcacttcggttttaaatataaaaacatgatatttattataaataagataaactgtaataatgctttagcattattatttaaaactataaaaacaaagagcaacatacataggggtaatatgaatgttgctctttgttctttatattatagggtaaatatttatgaaaaaaagattttattaactttatgtacttattttagtatatcattgtgtcagtatgatggcagactaaaaaaataaaagaaaaattataaatttcttaatagcggttttggatttgaataaattatttatggttattttaaagtaatatggaattagaatactaattgataatagtattgtacatgctgagttagcatatactattagtaacatatattagaacttgaaaatagctaaattagcataaataatgtcgtatattggagtgaagtgatttttatgggaaagtatacaataaaaccacagaaaatatatagattattacaaaaaatacataatttatatttaagtcgaacttctatgcaataagtaaaacaaatatgatatacttataaaaatgtaaattaatctagctataggaggaaataaatatatgagaaaaaattataggtataataaaagtaatgataataatataaaaaaagctagaataattattttatttatgactatagttttttttatagtcggaggtagctctctcattgcagcgaagttttctcaaaatagacaagaagtacaagcacttgatgacactaagcaaagtggagattcaaatgaaaaaaaagataacagagattctttgaatgttgagagtaattcagaagtagaagattcttcatttattgaaaagtatttgaatcagcaaatgaaggggcaaaagccagatggagcagacggtaagaaagtagtatatttaacatttgatgatggtccatcggaaaccgttacacctcaaatattagatattttgaagtcggagaatgtgcatgcaacattctttattgtgggaaaatcactagataaagatgagaacactaaaaatatagttaaacgagaattatctgaaggaaattctatagggaatcacacttattcacataattataattatttatatccaaatggaaagataaacttatcgaattgtatgtctgacattgaaaaaacaaatgagtcactaaaaaaggttttaggagaagatttttcaactagagctattagatttccgggtgggcatatgacttggaagaataaagattcagttggtatggatactatggacaaggctttacatgaaaaaaattatcatcaaatagattggaattcattatctcaagatgcggaaggtgcacctaagaatgcagagcaattaaaacatgaagttataaaaactacagcaggaagggaaaaggcaataattttgatgcatgatacttatggtaaagaagaaacagcaaaagcattaccaggaattatagaatatttaaagcagcagggatatgaatttaaggttattaaatagtatttattaagaaaaaagatgaatttaaaaattatatcaattcatcttttttctatttatataagaacgattatcgtagtctaggcttggagttttatacataatgtatgaaaaagtcaacttaaaggtttctgacgcttttgttatattagcacaaattttaaatttgactttttaattatacatatcatggcaaatggattaattctaaaaataaaatagatggtcatttggaaaggtgagatatacactagtgtttagagagaaattcatattctttttttctaccttaaattcaatcaattttgcatcttttttagtattgtttttcatatatatagtgaattcaaagggattttctataatagtatcaatagtataaggaaaagtattaatgtttttattattgtttgcacatatttcgatatcatgagctcttatgcagatatattggatattgtctggaatctcgttagtaataacatattcatgcccccaattttcagcataaatggtatttttcccagtctttttagctttagatatgtttttacatcctgttaatgtagcttctgtaagacttttaggatgtttaaataagtctctcttttctcgattttctaaagaaactccattttcataaacaattatattgtcgcaaactctataagcttcagctatatcatgagtaacaaagataacattaccactataatcttttactatagacattaactctttttctaaatcatttcttaaatgttgatctaaagcagagaaaggctcatctaaaagtaaaatatcaggagatgttataagtgctctagctaaagctactctttgctgctgcccaccagataactgccaaggatagcgtttttcgagtccaccaagatgtaatctttctatatattctctgactaaggatttcttttgatctttttccatcttagaaatgcctatttcaatattatcaattatattcatattaggaaacaaagcatagttttgaaatagatagccgatttttcttttctgtggagttaaattaattttattctttgaatcaaaaaaaatcttatcatttacaattatttttcctctagaaggagtaactaatccagatatacattttaaactcatactttttccggatcctgatgcacctaagaaacctagaacaccgcttttatgttcaaaattcacatttaaattaaatgaggaaagatgtttttcaatattcacatataatgacattatttagcactccttcccataagttttaactgaacttctgaccaatagtttaatatcagaattagaaataatgataaagtaacaattataataacccaaagaattgcttttttcatatctccaccttcggctgcaaagaatattgcaagtggcatagtttgagtttttccagggatattacccgctaacataagtgttgcaccaaattcacccatagctcttgcaaaagatagaactagtccacctataatacctggcatggctaatggaatggcgattttataaaatattttaaattcactaagaccaagagttctggcagcagaaagaatattaatatctatttgctcaaaagcagaacgtgtagttctatacatcataggaaatgaaaccactatagcagcaatgactgtagcactccagctgaaaattaaagaggtattaaagagctctagtagctttcctataggaccatttttgccacaaataagcaataaaaagaaacctacaacagttggaggaagaattaaaggtaaagtaaatatcccatctataattcctttagattttcctttgaaatttgacattctataagaaactataattcctaaaaagaatgttattattgttgataatgtagctgtttttatagaaatccataaaggtgaaaaatccatattaattcctccttcaaattcagacagactaaaaaaatgttaaaagatataatataactttgcgttagacaatctaaaaaaaatttaattatagaagattattattgttaaaagtcaatggaagatagaataaatatataatacaaacgtaaatatgttttatatagtaatgtttgatgatgtttcgttaagttttattatgatttttataatattagcattaattctataaaaatacaatagtgtattacatatgattaattatattctctattgataaaaaataataaggacattattaaaaagcatagctttaatatacttgtaatttaagaaatgtacggcattatcataaaaataaatttggtataaaaaaatttttttaggtaaaagatgttttctaagaatatatgatagattaatttaataataatattttagaagttaattcttaggttactaaattatcattacaaataattcggacaagcatttattttcatataaatatgattccaaataaaatattaattaagataggggaagagaatatgaattttgatcaaattaaatcaaagtctgaaagttataaggaggatatgaccaaatttcttcgtgatttagttgcaatacctggtgaaagtgcagaagaagaaggcgttataaaaagaatagaacaagaaatgaaaagcgttggatttgataaagtagaaatagatctaatgggtaatattttaggatatatgggtacgggagaaactttaataggctttgatgctcatattgacacagttggcataggaaacagagataactgggactttgatccatacgaaggatatgaaacggagactgaaataggtggacgtggtacttctgatcaattaggcggaatcgtttcatctgtatatggtgcaaaaataatgaaagacttaggccttttaaatgaaaaatacacagcattagttgttggttcagttcaagaagaagattgtgatggactttgttgggaatatataatcaaagaaagtaaaatcagacctgaatttgtagtttctacagagccaacagatggtggtatctatagaggacaaagaggccgtatggaaatacgtgttgatgttcaaggaatttcatgccacggttcagctccagaaagaggagacaacgcaatttataaaatggctgaaatattaatgaacattcgtgaccttaacgaaaatgatgcagctgacaataaagaaatcaaaggtttagtgaaaatgttagatgaaaaatacaacccagaatttaaagaggctaacttcttaggaagaggtactgttacaacttctcaagtattttacacttcaccaagccgttgcgcagttgctgactcatgctcaatttcattagaccgtcgtatgacagcaggtgaaacttgggaaagctgtttagaagaaattcgtcaacttccagctgttaaaaaatacaatgcaacagtaagtatgtataattatgatagaccaagctacactggtttagcatatccaattgaatgctacttcccaacttgggtaattccagaagatcatattgtaacaaaggcattagaagaagcatataaaggtctttacggcacaacaagaatcggtactgctgaaaatgaagcaatgagaaaagctcgtccacttactgacaaatggacattctctacaaacggtgtttcaattatgggacgtaatggaattcctgtaataggatttggaccaggtgcagaagctcaagcacatgctcctaatgaaaagacatggaaagaagatttagtaaaatgtgctgcagtttatgctgctgttccaactatatatatttcaaataaataaatattgttagcgaaaattaagggggatattaaaattatgagtattgtcgataaatatgttaatgcattaaaaagattaaaaattgatcaaatgtataaaaatgacttttttcttacatgggaaaaaactacagatgagttaaaggcagtttatgaagtggcagatgcattaagagaattacgtagaaataacaaatcaacaagattgtttgatagtggacttggaatttcattattccgtgataattcaacacgtactcgtttttcctatgctagtgcatgtaatcttttaggtcttgaagtacaagacttagatgaaggtaaaagtcaagtcgctcatggtgaaactgtaagggaaacagctaacatgatttcatttatggctgatgtcatcggaattcgtgatgatatgtatattggaaaaggaaataaatatatgcatacagttgctgatgcagtaagggaaggatacgaagatggagttcttgaacaaaaaccaacattagtaaatctacaatgcgatattgatcatccaactcaagttatggcagatatgctacatatcatacatgagtttggtggcattgaaaatttaaagggtaaaaaaatagccatgtcttgggcttattcaccatcttacggtaaaccattatctgtaccacaaggggttatagggttaatgacacgttttggtatggacgtttgcttagcacatccagaaggctatgaagtaatggaagaagttgaaaatatagctcgtaataatgctaaggaatcaggtggaacattcacaaaaactaataatatggcagaagcatttaaagatgcagatatagtatatccaaagagttgggctccttttgcagcaatgaaagaacgtactgatctttattcagaaggcgattctgaaggtattaaagaattagagaaaaaacttcttgctcaaaatgcagaacataaagattgggaatgtacagaggaattaatgaaaacaactaaagatggaaaggcactttatttacattgcttaccagctgatattagtaatttgtcatgtgaaaaaggtgaagttgaagattctgtatttgatcgttacagagttccactttataaagaagcaagctataagccatatattatagcagcaatgattcttctagcaaaggtaaagaatcctgcagaagttctagaaaaaatggctcaaagtgaggatataagattcaagggttaggaactaataaaaaatatacacatttaaaaagagcagctatgctgcatataagaacatttcatggcaattttagacttgttatttattctcatgtgcctaaatatttaaaaagagaattggagtgatatatggtgagtaagattgtaatagcgttaggaggaaatgcactgggagatacgctggaggagcaaatgaaatcagttaaattaactgctgaaagtattgtagatttgatcgaaagtggaaatcaggtagttattactcatggaaatggaccgcaagtgggaatgataaactcagcaatggagtttgttaaaaaatctcaaataccattaacaatgtgtgttgcaatgagtcaagggtatattggatatgatttgcaaaatgccattagggaagaacttttatcacgtaatttaaataatcctgtcacaactctaattactcaaactcttgtggatccaaatgataaagcatttttaacccctacaaagccaattggaggtttctattcaaaagaggatgctgaaaaattagagaagactggaatagtgatgaaagaagattcaggtaggggatataggcaagttgtttgttctccaaaacctattgatataattgaaaaggaaacgattttagagctcgtatcagctggagaaatagttattgcatgtggtggtggtggaattccagttattcaaacagaaaacaatcatttaaaaggtgtaccagcagtaatcgataaagattctgtagctgcgttattagctaaagagatagatgcagattgtttaattatactaacagcagtagaaaaggttgccgtaaactttggaaagccagatgttaaatggttggattcactaactgtagaagaagctaaaaaatatattgatgaaggtcaatttgcaccagggtctatgctaccaaaagtacaagcagctttagaatttgtttcttcaggaaaaggaaggactgcaattattacgcttctaagcaaagtacatgatggaattttaggtaaaacaggaactcactttaaaatgtaaagttaaacttaggcaacagcttaccgaaatcaaatacatttttattccacagggctatgaaaatttcgctgaaagcactaaatggaagcttgcacccacattagtttgctcctgttttcaacgtgacaagctgatgtgaatatgttaaaaggaaactcgactcgcttcgctcactgagtaagcgattcacaccaaatcatagatttgagctctctgcttaagtgcttttggcagcgagattttcaaatgcctgcttcacaaaaatgtatttgatttctgatatggaaatgcattctaattataagttaaactcttaaattggatatctataacaagcctgtaaatgccataaaacaaaaaaatctacaggcttagtttcaattattctagctatagcaatgcaactacatataaggaataatcacaaaaatatcaggcacaattaaataaataacaagtccatttgccagcctattttccatcatcctacgttggcaaattgacctaataggcccgctatgagggcaattcgcctccttgcccgatgaaaaatatccatggcaactttggacttgttattcattttcatgtgcctaaaatgaaagaagtgcttatgaatgattattattaaaaatggaacgattgtgactgaatcagaaagttattgttcagatattatgatagaaaataataaaatatcttgtattggggtaaatttgtccaatgataatgcagaaatcattgatgctttgggaatgtatataattcctggagcagtggatgtgcatactcatatggatttgcaatcaggaaatagccgttcaatagacgacttttatactggaactgttgcagctgtttgcggtggaactacaagtattgttgaccatgtagcgtttggtcctaaaaattgtactcttcgccatcaaattgacgaatatcataaattggctaatgggaaagcagtaattgattatggattccatggagtaatacagcatgtaaatgatgaggttttatctggaatggagtctttggctaaagaaggaatttctagctttaagatttatatgacatatgattttaaactggatgacgtctcaattttaaaggtactaaaaaaagcaaaagaattgggagtaattattgctgtacacgctgaaaacaatgatgttataaattaccttagagaaagctatgtttctaatggatgtttagaaacaatataccatgcaaaatcacgaccagaccactgtgaagcagaagcaattagcagagtactacatcttgcagcattggcaggagatgccccaatttatattgtccacatttctactgaaaagggattggatgagataaggaaagcaagagcgcaagggcaaaagaatattttttctgaaacttgcactcagtacctcacaatgacagagaaaaaatatcttgagccagataataatggactaaaatatgtaatgtcaccacctttgcgccagaagaatgatattgatgctctatggaaaggcatacaagatggcacgattaatgtaattgctactgatcattgttcattcaacctaaagggggacaaacaaaaaggagttaatgattttacaaaatgccctaatggagctcctggcgttgctgaacgagtaaggataattttctctgaaggcgttatgaaaaagaaaatttcaattaatcgttttgtagaacttttatgtacaaatcctgcaaagatttatggactttatcctaaaaagggttctttaattcctggaggggatgctgatattactatcattaatccaaatcctgagtatactcttacaagaagtatgcttgatggagcagtagattatacatgctttgaaggtatgacattaaaaggggatattgatactgtcatacagagtggtaaagtatcttataaaaataataggtttttagggaaaaaaggtgacggaaaatttattaagagaaaagtaattaaataatattaatttatttaattaatatattaatcacagtagccacaatagttggctgcataatttgaattattaacatgggcatatttacattgtaatgtaaatataagatgacaaaggggattttagtatgaatgtatatgatgatttggatttttttaagaggcttattaaggggattgcggaagagtttggaccaaattgtgaagttgcgattcatgatctaaaagcaggatatgaacatagcatcatagcgattgaaaatggccatgttacaggacgaaaggttggggatgttgcatcgcgaattgcaatggaaacaattcattccaatctcaagcataaagaccattatagttatagtacccgtacaaatgatggacgcattttgaaatctactactatatgtattccagatgaaaatggtaaagcgaaagcacttctttgtattaattatgatatcactcagctaatggtagctaataagactataggagactttgtttcaataaaggaaatagaaagcagtaatgaaggcgatgttacaattccaactgatgttaatcaacttctaaaagatttaattgaggaatcatatcaattaattggaaaacctgttgcagttatgactaaagaagataaaatgaaagccattaaatatttagagagtaaaggtgcatttttaattaaaaaatcgggagataaaatttcaaagttctatgatatttcaaaatattcactttatagctatttaaatagcactgatgactaaatatattactgcaagatatttgaaaggaagaataaaaaattgaacaattagtcttccattctgtagattattaatttaatgagtaataattttgtggaaattagatatatataataatgaaacttatatgcaaaagtaagcttagaaaaaatgtattaatggtatatatgaatttattgatgtataccattatataaaatgtaattaaaattaatcggctaagttgttatctgataatgaaaataagaaaggattgcttagtgaaatttatgatttagtaaacgtttccttagtgttttatatttaatggatagaattgaagctttggtcattagtaatgtgtattctaggtacatgaaagaaaatcacatttttgaatgtgctttattaggaggtcttgtaatgcaagatgggtatattgttaaaggcaatattatttttactaaagaactaggcaaatataaaatatttgaaaatggatatattgttattgatggtaaatttgttaagggggtttataaagaactacctgaaagatttagtaaactgaaaattttaaattatggacaggcacttataataccaggatttattgatattcattcacatgcgccacagtttcctaatttaggattagggctggataaggaacttatgccatggttagattcatataccttcccagaagaaaaaaaatattcagatatagactatgcaagaagagtgtattctgcgtttataaaaagtttatggaaatatggtactactagatcttgcgtttttgctaccattcataagaattcaacaaaattattaatggatttgtttgcagaagcaggattaggtgcatatgtaggaaaggttaatatgaatagaaatgcaccagaatatttattagaaagtacggaggaatccattcataatactaaagaactattagatgaatatgggcaaaaatatgaattggtaaagcctattattacaccaagatttgttccaacatgtagctttgagcttttaaaaagtcttggagaattatccaagaaatataaagtgccagtgcaatcacatttgagtgagaatttgagcgaaatcagttttgtgaaaaaactacatcccaaattaaaaaactatgcaagtgtctataatgaagcgggattgcttggtgatcttcctactataatggcccattgtatttggttagaagaagatgaaattgaactaatggtgaaaaaagaagctttcattgcccactgtcctaattcaaataacaatttatcaagtggtattgcacctattcgaaaattgatgaaaaaagggttaaacataggacttggaacagatatatcaggtggacatagtgtatcgatggcgaatgtaatttctagttgcgctcaggtgtcaaagttaaaatggctagaaagtaataaagcagacaagcctttaaccacagcagaattattatatttggcaacaaagggcgggggaaaattttttggtaaagtgggaagttttgaagaaggatatgaatttgatgccttaattattgacgatagcagtttatctatattcaaaccattgtcaatagaggaaaggctagaaaaatttatttacacaggtgatgacagaaatattaaggaaagatatgtagcaggtaaaaagatagaagagcccaaacaatattgaatatttttatactaaaatttgattaactagtcaataagtattgacttatatttatttcagttatagatatcacaatcataaactgcacttagactatgaaatatcttccaaccagaaatgagtaatatacttttgtggaatgtttcattggtaattttgatggatgtgattctttggctataagttgttccaaatgtgctagttcaaaaagtgagaatcgaaattttatatttcgttcttcgaactttctctgtgagcgcttgttctttgaggccagcactttgggtacaactttatagccttagaatcacccatcaaaattacctagaaactggaacaaaggtatgttattcatttcggtgagacatacgcataagttcaggtcttagctggggtatctataatttaaacagaaaaaatagaaaatagggggattatttatgagtgataaaatgcaacgcattccttttgaaaaaatgttaacttggattactagagagttaaaggaaaaagaatctatttttggcgtgcataaagataaattttattataatgaaactggaaaatcaattactttatttaatgagaaactttcatcaccaattggaccggcagcaggtccaaattcgcaattaacacaaaatattgtttgtgcatatttaactggaagtcgttttattgaattaaaaacagtacaagttattgatggagaagatattacagtgtctaaaccttgcatcaatgcacaagatgaaggttacaacgtagagtggtctacagaattaaaagtgtcagaggcttttgatgaatatgtaaaagcctggtttttacttcatgttttgatgaaagagctcaaatttgcaaaggaaagagattttatgttcaatatgagcgtgggatatgatttgaaaggcataaaatcttctaaaattgatacttatattaaagggatgcaaaacgcatcgtctacaaaaatttggacagaatgtcaagaaacacttctttctcatatagatatgttttctgaatttacaaaggaagatttggaaaaaatttcaccaactatttgttcatctattacgatctcaacacttcatggttgtcctgctaatgaaattgaaagcattgctagttattttcttgaagaaaagaaattaaatacttatattaaaatgaatcctacattactaggagaaaagtttgttaaagaaactttaacagctatgggttatgactatatagttcttaatggacatcattttacaaatgatttgcagtactcagatggagttgcaatgctaaaacgtttgaaggctgtcgcaaataacttaaatttagaaataggagttaaactaactaatacactgccagctaaaattattaataatgaattaccaggggaagaaatgtatatgtcaggacgtgcattattcccactatctatatctttagcaagtaaattagctaaagaatttaatggtgatttacaaatttcttattcaggtggggctgatttctttaatattgataaaatattatctacaggaattagtccaataacatttgctacatctatcttaaagccaggtggttacgaaagaataactcaaatggctaaaaaagttgagaagcagcttaatggtaaaatttctggaattaatgtagaaattctggaggacatagtcaaggaaactattaatgataaacattatcgaaaagaactacgacttgttaatagcagaaaacttaattctaaccttcagttttatgattgtgcagttgcaccttgctccgtgggatgtccaattaatcagcaaatttcacaatatacagctttagtaggacaaaaaaaatatgatgaggctttttcaataattgccatagataacgcgttaccggccattacatcaactatttgtaatcataaatgccagactaaatgtactaggattgattatgatgaatctgtttcaattagagatttaaaacaaattgcagttttaaatgcacaagataaatttattgagtctattgaaccaacagatattagaaatgggaaaaaagttgttattattggagccggtcctgcaggtctttcattagctcttttcttaaggagaaatggtgtagatgttactgtaagggataaaaaggagaaggcattaggtgtcgtagaacatgttatacctgagtttagaatttcttctgaaatgattaaaaaagacttggaaatggttaaaaagcaaggagtaaaatttcaattttgtgtagatgaaaatattaatttgaaggaattaaaaaaggaatatgattatgtagtgttagccataggagcatggaaacctggaaaagtttcactaagcgattgcgataataaagcaattaatgctatttcatttttagaaaaatataagaaacaaaaaggaaatattgctttaggtaaaaaagtttgtgttattggaggaggagatgttgccatggatgcagcacgctcagctaaaagagtgagtggtgttgaagaggtttctattatatatagaagaactaaaaaatatatgccagcggataatgaagaaatagaacttgctatttctgaaggtattttacttaaagaactccttacgccaatttctattaatgatggaaaacttacttgtgaaaaaatgatcttaggtgatagagatgcatccttaagaagaagttctgtaggtactggagaaataacaacattagatacagatacagtcattatagcaacaggtgaaaaaattgatagtaatttattaagacaaaatgaaataaatttggattctaatgaatttcctgttgttaacgaaaaattagaaacaaatattgcaaatgtatatattattggcgatttaaaaaaaggtccatctacaattgtcaatgcaatagcagatgcaaaaatagttacaaaagatattctagcaaaagaaggtttgagttctgattttaagcaaaaaggttattgtactgatgagaagatattatatggaaggaagggaatattaggagattcaaagtcttgtgaagaagaagctgatagatgtttagggtgcaagaacatttgtgaattatgcgttgatgtttgtcctaatagagcaaacgtaatgattaatgtaaacagtgattttgtttctaatcatcagatcgtgcatttagatggtatgtgcaatgagtgcggtaactgtggtgttttttgtcctcataaaggaaatccatataaggataaaataacagttttttggagtaaagaagattttgaaaatagtgataacaaaggcttctttgttgaaaatttagaaaaaggcatttgtctagtaagaactgaagaaagcgatattataagttatactgcttcgcagcaatcagcagcttcaaaagaaatggttagtctaattcaaacctgtatagataagtatgattatatcctttagtattaaaaattaaatagatagcaagcgaagggagtatgtaccattacaagagggggagtgtatggcaagaatttagaaaattgaaacaacaataaggcacatgaaaataaataacaagtccaaagttgacatggatattttttatttgattgtgcctaacactagctataattttaaggaggacatttcatgaaaaaagatgtaaccaaacaaaaaccatcatttttggagagttattttcacttggaagaaaataactcaaatgtaaagacagaaatacttgctggaattactacttttgttacaatggcatacattatatttgttaatcctaatatattaaaaatagctggtatgaattctgcaaatgcagtaggagatgcagcagcacagtttagtgtaggctctgatccaatagtatcatcagttttcgtagctacttgtctcgcagctgccattggcacattaataatggggctgtatgcaaatcttccttttgctcaggctcctggtatgggtcttaatgcattttttacgtatactgtatgtttaaccttaggttttacatggcatcaggctttatcatgcgtattcatgtcaggtgtattatttatacttattacagtaacatctatacgagaaaagatagttgatgcaatacctcaaaatctaaaatatgcaatttctggaggtattggactctatatagctcttattggattaaaatctggtggtgtagtagtgtcaaatccagcaacactagttggattcggaaactttgcaagtccaggaacactgcttactataataggaatcataataactgctgttctaatggctagggggattaagggctcaattttaattggaataattgcaactacaataataggaattccattcaaaatcacatcactcgaaaatttacatgttttcagtgcaccaccatcacttgctcctacatttgcagcatttgattttgcaggacttttttcaaaaggcggcacatcaataggaggcgcatttcttagcgttataatggttgttataactatttgtttagttgatctttttgatactatcggaactcttgtaggtacagctacaaaagcaggaatggttgacgaaaacggtaaggttttaagaatgaaaaaagcattgatttgtgatgcagtagcaacaactgctggttcagttttaggtacaagtacaatttcaacatatattgagtctacagctggtgtttcagaaggaggaagaactggacttacttcaacagtagtaggaatattatttattttatcattattcttctcaggccttgttggtatagttccaggacaagcaacagctccagcccttgtaatagtaggtgttttaatgatgtcagcaattgttaatatagatttcagcgattttacagaagcagttccagctttttttgctatatcattaatggctttttcttatagtatagctaatggaattgcagctgctatgattttttatccaataacaaaaatagctacaggcagacaaaaagaaatccatccaatagtatatatacttgcagtattattcattcttagatatattttacttccatttgaataaaaccatggaatagtaacttatataccagttaatgattagtaggaagtatattatgagttaaaacgttagtaatcacaaaacttgcgagataagttaagccacaatcaaataaataacaagtcaatttgccagcctattttctatcatgggaagctcgactcgctacgctcactgagtaagcgattcacaccaaatcatagatttgggttctctgctcatcggtaaattgacctaataggcccgctatgagggcaattgacttcctcgcctgatgggaaatattcatggcaactttggatttgttatttattttcagtgcctaaaacaaactatatcacctagttcagccaatatgacattttctattaaagatagaacaagtatctgtaagtttgaaatattcactattgggaaagtttacagatggtaattattggataagagaaaaatcaattggataaacataaatttctacataataaaatgttgcaagaaagatgggattaattatgtctgatgacgttaaagaaaaaatactaaaggctacaatgaaagtggtttcaaaagagaaaattagtggtactcgtatgcatatgattgccaatgaagcgcatatgagtcaagcaaatttacattatcatttctcatctaaaaatgatatattgatttctcttttagatgagatacaagaagaattttctaatgatcgaaagaattatattaatttggaaaataaaagtgtagttgaaaatatcagaggtttttttgatcaaaaaaagaatgatattctcaacaaaaaggaatttgattatacccagattgattattgggtgcaaggaacagtaaatgaagagataaaactaaaatttaaaaatacatttgaaatttggcgtgacaatattcgtgaagttttatataaaggtgatcaaaccgaagataaggatacgaagcatttggaaatgttaccgtacttagcagtgtctttgatgctaggtgcttcactgcaatacttaattgatgaggggaaatttgatctagatcaatattttgatctagcagaggaagtgatatttgggcaaattcaaaaaaataacaagcccatttgccttagcataaagtaattaaatttttagtaagacaagaattaatttaataggaggaattataatggaaaaaatattatggaaagaaaataccttgcctaaaactgataaagaagaaagtgtaaaatttcttaataaagaagaagtatcaaaggcaaagaaatttcatgaaagttttttagaatatgatgaaacaccattaatagatttaaaagagttagctgaaaagattggattgggaggaatatatttaaaggatgaatcttatagatttggattaaatgcatttaaagtgttaggcggctcatttgccatggggaaatatttggcagaaaagttaggtgaggatatagacgatttaccatatgaaaaaatgacttgtaaggaagttaaagataagcttggagatataacttttgtaacagcaacagatggtaatcatggaagaggagttgcatggacagctaatagattgaaacaaaaatcagtagttttcatgccaaagggttcctcaattaaaagattaaataacataaaggcagagggtgcagaagctagtattacagaactaaactatgatgatgccgtaagacttgcaaataaatatgcagaagaacataatggtgtaattattcaagatactgcatggaaaggctatgagaaaatacctgcatggataatgcaagggtatggaacaatggctttagaagcaagtgaacaattaaaagcagttgatgttttaaagcctactcacatttttgtacaagctggtgttggttcactcgcaggagctgttcaaggtttctttgcttcgcaatatgtagacgactgtccaaaaactgtagtggtagaatcaaatcttgccgattgttactataaatcagcaatagcaaatgatggggaagcaagatcagttggtggagatatgcagactattatggttggacttgcttgtggagaagttaacacaattggttttaccatactaaagaattattcaaaggcatttatttcatgccctgattgggtagctgctaaaggaatgaggattcttggaaatccattaaagggagatacaggcgtaatttcaggtgaatcaggagcagtaacgactggtgctttatatgaaattatgactaatgatgagtataaagatttaaaagaagctttagagttagatgaaaattctaaagtgcttttatttagtacagaaggagatacagatccagagaaatatagagaaatagtttgggatggcaaatattaataattaggtcacaatgaatgttttatcaagtgaaacttgattcatgtggggggggatccccatctgaatcttagttgaacttataccctcaaggggtacttcgtctaggggcgtgctgctgttatacaatcactaatgtgatttgcataagttcgagtaaccaaatacaagatttggtcagcagaacttttggactctcacttatctcccacttatagaaaaggagatattccaaatttgcaatttggcatagtcgctttcacaaagtgcgtgggagtgttacagcggctagacatcagataaatacccaagtagagttcaaaataaaaaaaggtgaaagctagtataaaaaggtatggaggagtttttatgaaaattgtaggtaatggaagactaataactcaaaacaaggaaaatccattttttgaaaatggtgcattagttataaatgatgataagataattgattatggaaatactggtgatatgttagataaatataatgaggcagaatatatagatgcaaaaggaaaagttattatgccaggtcttataaatactcacggacatatatatagcgcatttgcaagaggtatgaacttagatggtccaacatctaaaaacttcttagatatattaaataatttatggtggagattagataaaaaattatcgttagaagatataaagtatagtgcttacacaacattaatggatagtttaaagtttggagtaacaacattttttgatcatcatgcaagtccaaatgctgttaaagacagcctttttacaattggaaatgtagcagaagaacttgggataagaacttcgctttgttacgaagtatctgatagggatggagaagaagttttagaaaagggaataaaagaaaatgtagattatataaattattgcaatgaaaagcatgataatatgaagtctgcaatgtttggaatgcacgcaagctttacgttatcggatgaatctttaaaaaaatgtgtaaaggaagctgaaaagttaaattgcggatatcatattcatgtagcagaaggattagcagatgaagagcaatgtctagaaaagcatggcaagagaatagtagagagactaaatgattttaatatattgggagaaaaaacaattgcagtacattgtgtacatgcaaatgaagatgagcaagaattacttttaaatacaaatacgtctgtagtgcataatccagaatcaaatatgggcaatgcagtaggtgtatcaccagcacttgaccttataaagaaaggtgtaactgtgggacttggaacagatggttatactcaagatatgtttgagtccatgaaggttgcaaatataattcataagcataatttaaaagatccatcagtagcttggagtgaagtaccattaatgctatttgaaaataataaaaggattgcagaaaggcattttgcaggaaaatttgggattattgaaagaggagctaatggagatgtgataatagtagattataatccattaacgccaatgaatgaaagtaattataattcacatatcttgtttggaatgatgggaaaatctgtggacacaacaatagtaaatggaaatgttttagttagcaatggtaagcttcttaatgttaatgaagatgaaatattaaatgaagctagaaaagtaagtcaaaagctatgggatagaatttaatcaaagaatattttggaaatgaatatatttgttaaaagtaagtgtaataaaaataaaatataacaagattaggagaattaaaaatgaaaaaaataattaatactcaaaaggcaccagcagcaataggaccatactcgcaaggagtagtagctcaaggattagtatatacttcaggccaactaccattaaatccggaaacaaaagttttagaaactgaaataaaaacagcgactaaacaaagtttagaaaattgtaaagccatattagaaaaagcaggaacaagtatggataaagtgcttaaaacaactgtatttgtaaaagatttaaatgattttgcagcagtaaatgaagtttatggaacatattttaaagaaaatccaccagcaagaagttgtgtccaaattgctaaattaccaatggatgcaattattgaaatagaagtcattgcaacaatggaataatattacgatagatttataaaaagtgataagagaatggtgagaatattattaagagaatatttacggtggaaggtgaaaaaatgtttgaagacatatacaagcaaatattaattgaagttaacaactgtaatcagtgcgtaatgttaacttatcttgatttgcatagtgagagacaaggttccattgtcagaaaagttattttaacaaaggaagatatagaaaaaaagtctctttcacttagcgactatatttacgaaaaaatatgtagttgtttagaaagtgggaaacttgaatcttttaatatagaagaaaatgagactattttaattgaaccattcatccctaaaccacgtttaattgtttttggtggcggtcacatagcaaaacctttatcagaatttgcatcaagagcaggtttctctattacggttatagatgatagaccttcctttgctaatacagtgcgatttcctgaagcagaaaaagttatttgtgaaagtttcgagaaatcctttgatttaattaacttaaagaagtccgattatgtagttattataacaagagggcatagatatgatggagttgttttgcgtaaggtcttaaatcatgaccttagttatgttggaatgataggctcaaggcgcagagtaaatgctatgagaagcgagctattagaggagggcttttctaaagaaaagctggaatttgttaatgctccaataggtatagagatatatgctatcactccagatgaaatagctatttctatagtagcacagcttataagctttaaaaataagggggctattagtaagtttggtaaaaattttgccattccagagtttgatgcagaaatattagaaaatatatctaaaaaatcatcagaacctaaagcacttataactatactgtcttctaaaggatcagttcctagaaaagcaggagctaaaatgttgacttatcctgatggcagaactatcggaagtataggcggaggatgtagtgaatctggtgtattgcaaaaggcaagagaaattatgcgagaaaaaggtttttatatagagcaagttgacatgaccggtgatgtggctgaatctgaaggtatggcatgtggtggaacgatggaagtgctaattgaagtgatttaggcacatgaaaataaataacaagtccaaagttgctattattatttttcatcaggaaaggagacaaattgccctcatagcgggctattaggtcaattgggcgataagcagtgaaccaaaagtgagaatcgaaaagtgagagtccaaattttatatttggtttctcgaactttccctgtgggcattttatatttcgttcttcgaactttcacacagtgcaatctatgattttgtgtgaattcgcttaagcagacatcccaaatctacgatttgatgatggtcgcttactctgtgagtactcagtgagcctatgcgagttgagcttcctttgatggaaaataggctagcaaatggaattgtcatttttttgactgtgccttaggaagaattaattccataacattaattattactaaattttattgaggaggttgattatgtcacaaaataatattaaaaaagatgacaaagtaaatgaaatgctaccagtaagtcagcttgctattttaggattacaacatgtactagcaatgtatgcaggtgcagttgcagtaccattaataattggcggtgctgtaggtctaacacccgagcaattagcatttttggtggctgcagatttatttacttgtggtattgcaactttaatacaggcgattggtataggtccgtatgttggtattaagcttccagcaattttaggttgtacatttgctgcagttggtccactaattattattggtaaaagtttaggaatgcaaacagcgtatggttctataatagtagctgcaattattgttgtattagtagcgccattgtatggaaagatattaaagtttttccctactgttgtaacaggaacagtagttacaatgataggtctttctttagtaaatgtaggggttactagtattggtggcggttcaggagctaaagattttggaagtgtagacaaccttatattaggatcatttgtaatgatcattgttttaatatctaataaatttctaaagggattttttcaagcaatttctgttttaaatggtattattttaggaacaatagttgctgcatttatgggaaaagtagatttttcagtagtaacaaatgcaaaatggataagtattgttcatccttttaattttggattacctcaatttgatattggttcaataatcatgatgacattcgttatgttaacagtaatgattgaatcaacaggtacatttcttggaattggcaaggtctgtgaaaaggttatcactgaaaaggatattgtacgtggacttagagcagaagcaatttcaacatttctaggaggtatctttaattcattcccatatacaacatttaatcagaacctaggacttttagctttaagtaaagtaaaaagccgttttgttgttatagcatctggtattattcttatttcactaggattaattcctaaatttgcagcattagctactattattcctcagcctgttataggcggagctacaacaataatgtttgcaatggttgcagtcgcaggttttcaaatgcttcaaggtgtagattttaataatagtgcaaatatgatgattgttgcttgctctattggtataggacttggaattactgctgtacctacgttacttgaccaaacaccaacatttttcaagtcaatttttagtagtggtatagtttcggcatcagtaactgccgtaattctaaatgcatttttgaatcatagtaataggaatattgaaagcaatataaagcaaaattcggtttcagaatgaatcttacagatatctagcatacaacttagagttatttgataacttaccaaaatcaaatacatttttgtttcttaggactatgaaaatttaaatggaagcttacaccaacattagcttgatcccaatttcattgtgaaaaactaatacagacaagcttccattaagtacttatagaagcttgtctgtattagtttttcacaatgcctgctccacaaaaatgtacttgatttctagtgaagatattaacttaaagttttagcaacgttgcaaatatgttcatctaataagttgaattaacaagttatttatctatatagatatcataatcataaactatacttaaactatgaaatatcttccaaccagaaatgagtaatatacttttgtggaatgtttcattggtaattttgatggatgtgattctttggctataagttgttccaaatgtgctagttcaaagcttgttctttgaggctagcactttgggtgcaactttatagccctagaatcacccatcagaattacctagaaactggaacaaaagtatattattcatttcggtgagttacacgcataagtatagattatagttggggtatctatatattaaaatgttagaaactatacttagcaagttcttttgagaaataatttgctagaatttatttacagatttatactatttatagtaaatactgttaaaagatatgaaatgggaggttatttatgtttagattaaatataaatggtaaagatgaagtatctgaaattgataaatctttaatgtcttttttaagagatgatttgagaatcacttctgtaaaagatggttgcagcgaaggggcgtgtggagcatgtaccgttttagtagatgggaaaaaagtaaaggcttgcctccagaagatatcaaaattcgaaggaaaaaagattttaactgttgagggattaagctctagagaaaaagaagtttatgaacattgttttgcagaagcaggtgcagttcaatgtggtttttgtattcctggaatggtaatctccgcaaaatccttattagatattaatcttaaaccaacaagaatagatgtgaaaaaagcaattaatggaaacctttgtagatgtacaggctataagaaaattgaagaggctattttaatggcggcagaatattttagggacaatcttaaaatcccaactgctcctactgaattgaaaatgtcacagaaatttaaacgcgttgatgcagctgaaaaaataaatgggacaggtattttcgtagatgatatcgaaatacctggaatgttatatgtaaaagcagtacgtacaaaatatccaagagctattataaataaaattgatataaagaaagcagaagcacatccagactgcgcaaaagtcttacttgcaaaagatgttccaaacaataaaattggacatataaagcaggactgggatgtaatgattgctgaaggagatacaactaggtatgtaggagatgcattggcattagtagcaacttaccataaagacaaacttgatgaagtatgtcaattagttgaaattgactatactgaattggaacccattacttgtccgacagatgctttaaaggcagatgcacctctaatccattctgatggaaatattatgagccgtgatattctaaaacggggtaatgctaatgaagcaattaaaaattctaaatatgttgtaacaagaaaatataagacaccatttcaggaacatggatttatggagccagaatgcgcaatagccatgcctgaaggagaagatggcatattgttgtattctggttcacagtctgtatatgatgagcagcgtgaaatatcaaatatgctgcagattcctatggaaaaaatccattgtcattcacaacttgttggtggtggatttggtggtaaagaagatatgagtgttcaacatcacgcagcattaatggcatggtatacgaaaaaaccatgtaaagtaaaattctcgagacaggaaagtctggattatcatactaaacgtcatccaatggaaatggagtttacaacagcttgcgatgaaaatggttatttgacagctatgaaaggtgttattattgccgatacaggtgcatatgcatctcttggtggacctgtattacaaagagcatgtactcacgcacctggaccatataattatcagaatattgatatcttaggaatgtcagtttacacaaacaatgttgtatctggcgcatttagaggctttggtgtaatacaaagttgttttgctactgaaaataacattaatctacttgctgaaatggtcggaatttcaccatgggaaattcgttatcgtaatgcaattcgtcctggggaggttttgccaaatggtcagatagcagatgaaagtgtcgctatggcagagtgtttggaagccgttaaggatgtgtatgaatcaaatccatatgcgggtattgccattggattcaaaaatagcggaactggtgtaggtaataaagacattgggcgttgtattttatcaattgaagatggaaaagttcatattcgaacttctgcagcatgcatggggcaagggattgcaacaatgtgcactaccgtattatgtgagacaactgggttagatccggttcttattatacacgaaagaccagatactattcgtacacctaactcaggaactagtacagcttctagacaaactgtagtaactggagaagctgtaagacgagcatctgaaaaattgaaagcagaattagataaaggcttagggcttgatgatttagaaggcagagaattttatggagagtattctgcaaagacagacccaatgggatctataaaagaaaatccaattagtcatgtaagctatagctatggagctcaagttgttattttaaatgaagaaggaaaagttgaaaaagtagttgcagcatatgatgttggaacacctgttaatattcagtctgttgaaggtcagattgaaggtggtatggttatgggattaggttatgctttgacagaagaatttaaaattgaaggaagttatcctaaaacaaaactaggcacgctaggacttatgagagcgactgaggcccctgagcttgaagttattcttgtgcagagcaaaaataaaattccagagacttatggtgccaaaggttgtggagaactatgcttgattccaacagctccagcttgttcccttgcttactatagattagacggaaaattccgtgctcagttgccactaaaagatacattttataaaaaacaaaagaataaataatatataaaaggaagtatttattcttttgtttttaggaaaggaagattcttagatgaaaactaatggcattatagtggctgctggtttatctagccgtatgaaggcatttaaaccactcctgaaattgaaagaaaaaactataattgaatgcagtattgatagtatgcttaatgctggagtgaataaaatcgttgtagttttaggatttaatgctgaagaagttgagaatttactacgtaataaatatgattgttcacaattaacatttatatacaatgagaaatatgctgaaactgatatgcttgcatctgttaagattggaatattagcgctagataactgtgatgccttttatcttcttccaggggatatgccagcaattgaaacaaaaactttccttatggtgaaagattcaataatcagaacaggtgctatggtggcttttcccactattaatggacaacgaaaacatccacctttgatttcttggaaatgcatagattttattattaattttcatggagatgggggtcttagagaattatggaatcagcttgaagaccaaatagtaacagttcatgttgaggattttgggtgtacgatagatgcagatacaaaggaagattacaataggttggtacattatatggatgaaaagaattgagattttaatatattaaaattggattttaagtaaggaaatacattgcaaatatttttgtaagataacataaagttaaagactttgaaattttgcaaaaaataattagtagatatatgggaggcgctatgcatggaaaaaataagtgaatctgtaaagaaaaaggatcatgaatctaaaataaggggtagtgctcttttcgtggatgatcgtgtgatggatggtatgctttatggtaaactactgcattcagcaaaggcaaaagcacgaatcgccaatatttcgattcctaaattaccggaaggttattttgttgttgataagaaagatgtaacaggtgtaaaccgtgtccatattgttgaggatgatactccggtttatgctaaagatactgtagagtatgttggggaaccgattttaatggttgttggacctgagtttaaagaagttgaaagaattttaaatgagattatcgtagcatacgaagaagaagttcctattttggatatgcgtaagtctgatacagtttttttccattacaactatgcaaaaggtgatatagataagacgttaaaagaagctgatcgtgttttaatagaaacatttcagactggatatcaagaacaagcttaccttgaaactcaggggatgattgcttatccccatgatggaagaatgactgtacgaggttctatgcaatgtccatattatgtttatggagcagtttcaaaagcattgggttatgaatcaaaggatatacaaataattcaagatgttactggtggaggatttggaggaaaagaagcatttccttcaatacttgcctgccaggttgcagttgctgctaaaaaggccaatagacctgttaaagttatatttgatagaagagaagacatggagtttacttcaaaacgtcatccatctatatctacttataaggtagctattaagaatggcaagattactggcatggacattgatgttttatttaatagtggtgcatacactacactttctccagttgttttacagcgcggcttaatttgtgcaaacggcgtataccgtgtagataatctccgtgttgtgggacgtgctgttaagaccaatacagtaccttgtggcgcataccgtggatttggtgcaccacagacgttctttgcagtagaaatgattatggatcatattgcaaaagaaatgggtgttgattcccttaagcttaaggaagaatatattgttaaacaaggtgattctacgtccactagtggcaaatatcatttccatgtacctctacctgaaatgattgaacagattgataaactttgcaattaccgtgcaaaacgagaccagtataagattcagaatggcagatatcgtaaaggtattggaatgtctttatttttccatggatgcggttttactggcagtggagaacgtgatttcattaaagcagttgcaaaaataaggaaaaattcagatgatactgtagatattcttgcaagtaattcagatataggtcaaggtcttaaaactactttctctaaaattgttgcggatacccttggtatttcatatgaacaagtatttatcaataatccagacacagatcttgttcctgattcaggcccaactgttgcaagtcgttcgcttatgacagttggagaattattaaggcgtgcagcagagagacttaagaaagaatggaaatcaggagaagttcaagttatagaagaacatttcgttgaacctgattttgtaattccatttagtcttgatgaatttaagggagatgcatatccaacctattcttggggagtaaatgctattgaagtggaagtagatacacttactgctaccacaaagatactaggagcatggggtagctttgatgttggtgttcctattgacatgaatattatacaaggacagatgcagggcggattccttcaagggattggatatgcatctatggaacagatggattacaacgataaaggtgtgattagaaataatagttttagtgattacattattcctacagcagtagatgtaccaaatctagttactgaaataatcaataatccatatacacatggtccatatggagcaaagggtgcaggtgagctacctctagtaggtgcagctccagcttatgttgaagctatggaaaatgccattggtggaaatctaaataaagttccattcacaacagaagatacaatgatcgttttacaggaggtgcataaataatgataaaatttattcttaatggcaaagaggtcacatcagattctaaagcaaatgagcgcttactagatgtacttagaaatgaatttcgtattactggcgtaaagtgcggttgtaaagaaggtgaatgtggagcttgttctataatccttgatggcaggttagttaattcttgtatggtggctatgggtagcattgaaggtagtactgttgtcactattgaaggctatagagaaactaaacgttttgcagttattgataaggcatatgcatcagtcagtgctgtacagtgtggtttttgtattccaggcatgatccttgcatctgaatgtatccttaacaagaatccaaatcctacagaagcagagattcgcgaaggcatttctggaaatctttgtagatgtactggttataatgccatagttaaggctattggcattgcagcaaaggagggaaaaggattatggtagattgttataaaccaacatctttaaaagaagcattggacatcctagcaaaggaaagtgttacaccttatgctggaggtactgatttaatgattaaaccagatgaaaatgccacatatttattccttgataaagtagcagaaatgaaaaatattgtagaagataaagaatatattcgtattggtgcagcatgtacttatactgatattattgaaaataaacttattccagcagtattgaaagaagcagtttcacagattgcagcaccagcaattcgaaacattggtactgttggtggaaatatatgcaatggttctccaaaggctgatagtgcactgatcttttttgccactgactctaaactgcgtcttgcaaataacagaggggaacgagtaattcctatttctgacttttaccttggaagaaagaatactgcgattgagaaagatgaactccttattgagattctaatgaataagaataatttaaataattactattacaagaaggttggtgaaagaaatgctttagcaatttcaagagtttcttttgttggcataattaatatagtcgatgataaggtttttaactttagaacagcatttggtgcagtaagtgatgttgttataagccgttcagatattgatgcaatgcttataggaaagactgttgaagaagctaaggctctaaaggataagtatctagcagcatacgaaaaggaaattgttccaataaggggtagagtatctgcaaaatatagaaaaactgtgtgtatgaatttattacgtgattttcttgaaagtaatggaatttaacttatataagattctggcattaagtggaattttatttaggcgggatttgattcccgtctgaatcttagtggctagagataagataaagttaaatagaatataagcatttaatctcaataggattgaatgctttttaggcatatgaaagaaaataacaagtccaaattttatcaagcaaggaagtagattgtctcatagcgggcttattagggcaatctgctgacgcaggatgatggaaaataggcgtagcagatggactcgttattttttgaatatggctcattattaaaattgttgataaataaggatatattctaaacagatataataataatccataatatgtatttttagggtttaattattttataaaaacgtgtagaataatattgtattaaaagtaaaatataaccaattagtctgcgagatcaaattggaatctaataaccaaaatataagatactaatcaatttgttaaagtttgaatgatatgtacaagcctatttgagttttgtggaagaataagataatactacttaagtagagcaagaggtatagatatgaagagtaaagagaagagaacaacaggcggtataattgttgccgcaggaaaaacatcagaaagaaatggattaaatccattattgaaaattggttctattactgtagtaaaaagaattgttttaacttttcaaaaagctggaatttcaccaattgtggtgattactggatataaagctgaagaaatagaacatcatttagctgattatggagttgtatttttgcgaaatgatcaatatgaaaactcgcgaaagttcgattctgcaaagataggactagattttttacagaataaatgcgaccaggtattattcactccagttaatattcctatgtttacaccagagacgcttcaaatgatgatagaatatgatgaaaaattactttcaccagcatatcgtggaaaatctgggcatccccttttgatatcgtctgaattgattcctaagattctaaaatataatgggaatatgggattacgaggagcaattgaaaatattggagttaaaagacaatggatagatgtagaagatgaaggtattctatatgatactgattatattgaccgattagatcaacttttaataaaacataataaacatatacttcatccctttgttaaaatcagcattgaaaaagaatccttgttttttgattcgagaacaaaattgcttctaattctgattcaagatacccactctgtacgaagtgcatgcaaacatatggcattatcttatagtaaagcatggagtatgttaaatcagttggaacaagaactagattatgcagtagttgaaagaaagcatggtgggagcaatggtggaaaaacttatcttacaaaagaaggtactgaatttttggaaaaatatcagcaatttgaacagaatgtacaccagtttgcaaagaatgaatttgaaaggttattttagaagttgcaattgatatttaaatagttttttgaaaaaaattttacttataattcgttatgcttatacgaaattaccaaataatgatggaggaacaaaaatgaaaaagattaaaactacagaagctgtaggtaatgtaatttgtcatgatattacacaaattatcaaaggagaaaaaaaagatgttgcgtttaaaaaagggcacattgttactgaagaagatattccagttttattatcaataggtaaagataatctttatgtatgggaaaaaaaggaggggatgcttcatgaaaatgaagcagcagaaattctctgtaaaatatgtaaaagtgactatatgagtgcaactaaggtgaaggaaggcaaaattgaactaattgcggcagaagatggtttgcttaaaattgatattgaaaagcttcgtaaaataaattctcttggtgaaatgatgattgcaacacgccacagtaattttcctgtaaaaaaaggtgataaattagcaggcacacgtattattcctcttgtaattgaacaaaagaaaatggacgaggcagttaaactggctggtgacaaaccattaatggagattcttccatttgtccacaaaaaagcagggattgtaactacaggcaatgaggttttctatggaagaattaaagatacatttgggcctgttattagagaaaagcttgcagaatataatgttgaagttttaggacagaaaattttaagtgatgatcctaaattaattaccgaagctataaaggattttattaaagaaggtgcagaattaataatatgtacaggtggaatgagcgtagaccctgatgatacaacaccaactgcaattcaaaatacaggcgcaaagattgtttcatatggtgctcctgtgcttccaggtgcaatgtttttactagcatattataatgatacacttccagttattggacttccaggctgcgtaatgtatgctaaacggactatttttgatttggttcttccaagagttatggtaaatgacaaaataactttagaggatattgcaaaccttgggcatggtggattgtgtctttcatgcgatatttgtacattccctaattgtggtttcgggaaataagactgacaaagcttaatcaagtgaaacttgattcaggtgggatttgatcccatatgaatcttagataaatattgcaaagtcaacctgaaagtgttcctatggcttaatgtctttaataagtatttaaaaattatctgtgataaacttggttgatatgaggtgaataaaatggtagatagtagtggtagaaatattgaatactttagaatttctgttacagatagatgtaatcttagatgtgtatattgtatgccggaatgtggaattgaaaacttagaacatgacgaaatacttacttttaaggagattatgcttatagttaaaactgtttcacagcttggtattcacaagattaaaattacaggaggagaaccattagtacgaaagggtattgtaaatttagttagaagaatcaaagatattgatgggattgaagagataacaatgaccacaaatggcgtactttttggtgacatggcagatagtttagcagaagctggtcttgatagtgtaaatatcagtcttgatacattaaatagtacaagctttaataaaattactcgcagagactgcttagataaagtgaagcttggattaaaaaaagcagtggagcttggattgaaaacaaaaataaattgtgtcccaatagctcagttaaatggtgatgacttaatagatatattgaaaattgctaaagaaaatccaatcgatgtacgttttatagaacttatgcctattggttttggaaaaagttattcacctgtttgtaatgaacaaatatttgagcagatagaacaaaattttggaactcttcagagctcaaaaattaaacatggtaatggaccagctgagtattataatttatcagattttaaaggaagtattggctttataagtgcaatttcaaatgaattttgcgatacttgtaatcgtattcgtttaactgctgatggaaatttgaaattatgtcttcattataataatggagttgcattaaagcctcttctacgtagtggaataagtaaagaacaattaaaaagagttattgaaaatgcaatatataataaaccaagtcatcatggttttaatagcagtgacacggaaaatatagaattaaaaaacatggttcaaataggaggataaatactgttggaaaagttatagcagtatgcatcaatagaatgtaaaaacttaggaagtataagataggagaataagaaaaatggaactaactcatataaatgaagaaggaagagcaagaatggttgatgtatctgaaaaaattgacactgtacgggaagcagtagcaattggaacagtttccatgaaaagagaaaccattgaaagaataaaagaaggtactatttcaaaaggggatgtattatcagtagcgcaggtaggaggtataatgggtgctaaaaatactccgcaaataataccaatgtgtcatcctataatgatatctggctgtgatataagttttcgaattgacgttgaaaacaataaaattgaaataactgcaactactaagactgtagggaagacaggcattgagatggaggcccttactgctgtatccactgcagcgttaaccatttatgatatgtgtaagtctattgatagagaaatggtcataaacaatattatgcttgtaaaaaaaagtggagggaaatcaggcatatttgaaaggaagggattatgatgggtaaggttattgcagtgaatataagtgagaaaaaaggtgttataaaacatcctatagaaaaaggtttttttagagttaatcatggtctcgatggggatgctcatgcaggagagtggcataggcaggtaagtttgcttggaactgaaagtattgataaaatgaaatcatcaggagtcgaaggacttactccaggaaagtttgctgaaaacattactactgagggaatagttttatatgaacttcctataggaacaaagcttaaaattggggatgttatgctagaagttactcagataggaaaggaatgtcatttgggctgcgaaattagaaaattggtaggagattgtgtaatgcctagggaaggaatatttattaaagtactagaagaggggtatattaaagctggagataatattagaatagtttaaaataaaaaaataacaattcgagtgacatttttgaattgttattttttttcactatattaagctattccataaccatatttttcaaagatctttttacaagtatcagtaaataagaaatcttcaaatgcttttgcggcatcagcatttttactagccttaattattccgattggatatgtaatcggtgaatgcttgtcctctgctattgtttctataattttagcatctttgctgcttaacgcatcacttttatatacaaatccaacttcagcatttccagaagtcgaccaggcaagtacttcttttacatcttttgcaaaaacaagttttgatgaaatagaatctttaataccaagcttagtgaaaacttcatcagtatattgtccagctggtacacttttaggttccccaacagctatctttttaaccttatcacttgttagatcagaaagaccggttatagcagtatctttaggtccgactaaaactaaatcatttttaactaagtcttttttagtattttcaagtaataaagatttgctgtctaatgctttcatttggctttgaccagctgaaatgaagatatcacaaggagcaccttgttctatttgttgctgtagagatccagaagcaccatagttaacagttaaagtaacatttggagcagtctttttgtattcgtcttgtatatctgtcagtgcttcttttaaactagcagcagcggaaatgtttaattctattgaagcttcagtagcagattccttttgtggagtagttgatgccttttgagctccgcaaccaataagtgacgttgttaataaaacagttactaaactaaataatcctattttctttttcataaataaaacctcacattcataaaaagatttctattataattatgttttgttatgtttggatatgtttcattacgttttgattgttgcttattatactagcatttatttataagaaaaacaatatgtaattgtaaaaataagtacttgaatagaaatattgacaaaattattatcaaaaaataattctttacaatactagcatagtggtatatgtgcgtatatttatgatacattatgttgtagatatctaatttaagaatttaactgacacttggaacataccgatttgggcaggtttagcataagtctaagtttatatttgtttatctatatttagaaaatatattattaaatgctagaaattctcagctctaaatgttagaataaattattatacggaggagggaagttctatgaataatgaagaatccctaacggcagtagatgtcgctgaactattaaagataactaaaaatacagtgtatgaaatggtcaaaagaggtgaattacctggatacaaagtagggaaaaagcttagaattgataaaaaggatgttgagaattacatcaatagtcaaaaggtaacaaaaggtagcaataatcagattaagatattaatagatgagccagtaatagaagaaaacctgagtaatataaaaaaagtggaaaattcaaatgatattataatatcagggcaagatgtgattttagatgttttagcagaaaaaattatggaaaaggcaaatgatgtaagggtacttaggtctaatacaggaagctattcaggtctatatgacttatataatgataaaatttctatatcgtcagtacatttatgggatggagataccaatgaatataatactgcttttgtaagaaaactagttccaggtatatcttgtttaattataaaccttgcttacaggaatgttggcttttatgttccaaaaggaaatcctaataaaataactaattggaaggacttgattaaacaagatatatccatgataaatagggaaaaaggttctggaataagaattttgcttgatgagaaattaagagtcaataatataaatagagaacaaattaaaggatataatgttgaaaaacaatcccactctgcagtagcaagaagtattgcaagaggggaaggtaatgttgggataggaaatgaaaaggcagccaagcaggttgatgggattgattttattaaaattcaggaagaaagatatgacttagttatcaaggaatctgatttaaaatatcctatatatcaacttataattagaactattcaaagtgaagagtttaagagggaaattgaaagtttaggcggatatgatttaaaagatataggcaaaatgcttgataaaacataaataatgatatagtataagattaatattataattttatgcaaaggcgcagtaattttactgtgcctttttgttattaataaataaggtatatgaaagaaaataatagatgatgattgattattttttgaatatatctaaataaaggagtgatagtatatggataaaataggagtatttttaaacgaaagagatcttataagttcttttgaggaagcacgatatgtaaaaatatttgcaaaagaaaaacatttgtggaaaacaaaaaaaaacattttaattagtagggtaggtggtgaaaaatcaataaatgaaatcagacaggaatacaaaaatgtaattaatgaaatggatgattgtaaaattataatagtaaaaaaggcttttggaattccgtatagtgtattttatatgggggattttagtgtttgggaattggaaggaaacccatttgattattttgatgaaattattaaaaatgaaatagtccaagaggagaatgaaaataaagaagttgaaattgctaagaaacttggtgatggatatttaatgatagatctacaggaattagagctgataaatcctgaaataacttctaaaaaggcaataattccttatttagaaaaagaggatgtaaaaaaaatagaagtacgctgttgtcatgtaccgccttggctggttgcaaaaatggacaagggtgaaatcttattatccattaatgagataaaaagaaatgattatatggtaactgtacagaaaaatgtttgaggcacatcaaagaaataatagactaggaggcgaatttatggagaaaataataactaagtatggtattttaaatgatgctattattgctgagtattattccactggagaaccagaagcgtataaggtggaagaatacagtgaattaaaagttttagactataatttagttccgttgcatggatttgtagatgaaagaagaaaagaatttccaccagtaaaggtatttaagaatggcaatattaagagcatttcattaaatgatttgacagtaataaatactagtataggtgtatttgaagttgaaaaaataacattctatgaagatggtaaaataaatagattgtttcctttggatggaagattgtcagggtattggactgaagatgatgaatataaattagcaaaagcttataaatttagttttgatttttcatcatttgaagctaagattatgtctcttcatttttatgaaacacaagaacttaaaagtatcacattgtggccaaaagaaaaaattaaaataaatgttggagaatgtaatttcgcagggagaataggagtctctttatataaaagcggaaaaataaactcctgtgagccattaattgcaacaaatataaaaacgccaattggaaaaatcgaagcttatgacgttaatgcaatgggaattcatggggatagtaattctttagaattttatgaggatggaagcataaaatctcttatcacatctactaatacaattacaattaaaacatcggaaggtgacacgatttttcattctcccaaaaaaattagattgtattctaacagtgaagttctggatacaataactttaaaggtggaatttattgatgataaggtcataatagataaacaatatgaatatgagattaaagaaaataaatttgagataaaagcatttggagaaagacattttacccttaatggagatagaaataaataattctcattaaatttaacaaaacacgaatgattttgataaattgataaaaatatatcgttatcattaaaaaagttatagaaaataaaaaaatagtttgcaatatcagttttttgtgatattatagtttcaataaataaaacaaacaaatgaaaaacaaaaattaataaaaaagtaatttatacacaagtttttttttgaaacaatacaacttaaattaaaaaatgaatattaacctgtcattaaggcaatggagtctaagtgtttaactcaatgaggaagttaacgacttagatttttttattctctaggaatttatattcaagttaaatctgtatataagttatagaaaagaccaattcagaagattacggtttgtaaagagaataaaaaagaaaatatattcgcctgccaaatttttctcacatacgttcaaaaaggcagatgcgtaaaaaaatctacggctccacagtcgcctacgatttttttattacaatgaaaggacaaaggagtctattttattataactattaatagttaaataaattaggcttattttttaaactaatttattgttatattaatacaaataagttataacgacccatttgggcttatataatctatttaattaagaggaggaaactaatatgagacaagtagctatttatggaaagggtggaataggaaaatctacaaccacacaaaatttaacttcagctttagctgaaatgggaaagaatataatgatcgtaggatgtgatcctaaagcagattctacaagattagttcttggaggtttagcacaaaaaacagttctagatactttaagagaagaaggagacgatattgaattagatgcaatcttgaaaacaggatatggaaatataagatgcgttgaatcaggcggaccagaaccaggagttggatgtgcaggtagaggtattattacttcaataggaatgcttgaacaattaggagcatatacacctgatttagactatgtattttatgatgtactcggagacgttgtatgcggaggttttgcaatgccaatcagagaaggtaaagcacaagaaatatacatcgttgcatctggagaaatgatggcattatatgcagctaacaatatttcaaaaggtattcaaaaatatgcaaaaactggtggagttagattaggtggaatcatttgtaacagtagaaaagttgatagagaatacgaactattagaagcatttgcaaaagaacttggaagtcaacttattcactttgtacctagagataatatggttcaaagagcagaaatacacaaacaaacagttatagaatttgatccaaaggctgatcaagctgatgaatacagaacattagctaaaaatatagaaaataataaaatgtttgttattccaaaaccaatgaaacaagaaagattagaagaaatcttaatggaatatggtttaatggatatctaggatcaatgcacaattattgattaatgttgaaactcataaagaaagttttgctaaccaaatataagattcccacaaggggaaggttctgctatccaaatgcaaaatttggagcatcacttttgaagtatcacttttggagtatcacttttccattcaggattttttgaattcaattatttataatgtgaaatttaagttgaaaaatatataaaacaaaatattaaataaaaggagattagagagatatgtatatgattcgcgcaataataagaccagaaagagttagtactgtgctttccgaattattggatgctggatttccagaagtaacgaagatggcggtttatggtagagggaaacaaaaaggaataaaagttggagaaatatattatgatgaacttccaaaagagatgcttctgattgcagttaaagatgaagataaagacgatgtcataaaagtaataatgagaaattctagaactggagaaaaaggtgcatttggagatggaaaaatattcgttgcaccaattgaggaagtatacactgtaagtagtgggaaatcaggattataaaattgaaataggaggaatagctttatgaaagaagttatgtgtattattcgtttgaataaagttaataaaactaaagaagcactcgcagaagctggctttccatccattacttgcagaaaagtacttggaagaggcaagaaatcaattgatatagctttagttgaagcttatatggaaactggtgaagtgccaccaacatcgtatggtgagaatttatcagaaagaggaagattaatacctaaaagatttataactttagtagtaaaagatgacgaagtaaaaacagtagtagataccgtgataagtgtaaattcaactgggactccaggagatggaaagatatttgtattaccagttgaagaagtatacagagtcagagatggacaaataggtgaagaggcaatttaaagtgtggaggtgaagttaatgagtaaagttgatagtgttttggacaagtatagtgccaaagtatataaaaacagaaagaaacatatgcttgaacttgagcaggaaactcaagaaatagatgcaaatagaagaactataccaggagttatgacacatagaggatgttgttatgctggatgtaaaggtgttgttcttggaccattaaaagatatagtacttttaactcatggaccgataggatgtggatattattcatggggtactagaagaaataaagcagtaccacagaaaggtgacggaaactttatacaatattgtttttctacaaatttaggcgaaagtgatatcgtatttggtggagaaaagaaattaaaggctgctataaaagaaattgtagatatatttaatccaaaagcaatatttatctgtgcgacatgtccagttggacttataggtgatgacttaccagcggttgcaaatgaatctaaagaattgtatggaattgatgttatatcattcccttgtgaaggatataaaggtgtatctcaatcagcaggacatcatattgcaaataacaagctgataaaatctgtaatcggaactatggattacacaccaaaaactcattcagttaatatccttggtgagtataacataggtggtgacgcttgggaaatagaaagaattctaaagaaaataggctatgaagttatatcagtcatgacaggtgatgctagcattgacgatataagaaaagcccatactgcagatttaaatctagtccaatgtcaccgttccattaattatatcgcagaaatgatgaaaattcaatatggtactgcgtggataaaagttgattttatcggggttgattgtactgttagaactttaagagatattgctaaattctttaatgacccagagtttacagaaagaactgaagcagttatagctgaagagcttgaagatattaaagatgatatggattattatagaagcaagttaactggtaaaaaggcaggtttatatgttggaggttcaagatcccaccattatcaaatgctattaaatgacttaggtgtagaaacattagttgcaggatttgaatttgcacatagagacgattatgaaggtagagaagtaataccaactataattgaagatgcggatttaaaaaatatcgaagtattagaagtagaaaaaattgaaggtaaatataaaccagttaaaacagatgaagaattagaagaattaaagaaagaaatcattaatttagaatattatccaggtatgatgcgtgacatgaaaaaaggttccattgtagttgatgacttaaatgaatttgaaacagaagaatttattaaaaagttaaaacttgacatgtttttctcaggcattaaggataaatatataatacaaaaaggtggagtattatcaagacaattgcattcttatgattatagtggaccttatgcaggatttaagggcgctgcaaactttggtagagatgtaacaatgagtttatatactccagcatggaaatacactgtagctccatggaaaacagaatcaatattagaaggaacatttggaggtgaggtataatgttagatttaactcctaaagaaattaaggaaagaaaagcgattactattaatcctagtaaaacatgtcaacctgttggtgctatgtatgcagctcttggagttcatggatgtatgccccacagtcatggttcacaaggttgttgctcatatcatagaacagttttatctagacatttcaaagaaccagctatagcaactagttcatcatttagtgaaggtgcttgtgtatttggtggtggtagcaatattaaaactgctgttaaaaatatctttgatatgtatgatccagaaataattgcagttcatactacatgtttatcagaaacaattggtgatgatttaaaaggttttattgatgctatagatattccagaaggaaaatatgtgttacatgcaaataccccaagttatgttggatcacatattacaggattctctaatatggttactggctttattaaaggtttatctaaaacaactggagtaaagaacggaaaaatgtgcgtgattcctggattcgttaaccctggcgatatgcgtgaagtaaagagattattaaagcttatgggtgtagattttacaatgttaccagatacaactggagtttttgatgctccgatgactggaaaatatgaaatgtatccaaaaggtggtacaaagattcaagatattattgaattaggtgactgcgaaaaaacattagcactaggaagttttgcttcagaagcaggagcagctactcttgaaaaatcattcaagattccatactctacattaaaaatgccaataggtattggttctacagatgagttaattatggaattaagtaaattcagcaagcaacaagttccttatgaaattgaagaagaaagaggacaattagttgatataatgattgactctcatccatattatgatggaaagaaagtagctttatatggagatccagatgtactaattgctttatctaaattcttattagagcttggaatgattcctaagtatgtaattacaggaactccatccaatgtatttgaaaaacaaatgcaagcattgtttgatgaatttggtgttgaaggctgcatagctaaacaagatgctgatctttttgaattacatcaattaattaagaatgaatctgttgatttactaatgggtggaactcatggtaaatacatagcaagagctgaagatattccactagttagaattggatttccagtattagatagatatgttcattcatatatgcctaatgttggatatagaggtgctatgagattattagaattaatgcttggtgcattaatggatagacaagatagagacgtaaaagatgaagattttgaattagtaatgtagataaatatgtggaatttagagttgtgtggtggtctaccgaaagtacaggtactctgttgtttcggttgctatagaatatagctgtgaatttctaacattagaagttgtgcccagaatgctagcatcaaagcatgctttgaacaagcatatttggaacaacttctaatgaagaaatatctacagctatattctaaatgcaacactgcacaaaagagtaccagtcctttctggtgtagtatatactaaaaacttaaatttactttttaaatttatttatctaaaaatagtgtgtgaagtgagtgtttaataagatgtgtatttgggataagcaataatggataatttataatgaagaaatcctgtggcagtattctagatgaaacgctgtatattataaccctgtgattacaaaagagtaatatctcttttgggatatagtcttcactgcaagttaagtttaaatgttgatttatttatttaaaagagtacccaccatttctggtgtagtgtatatctaaaatttaaatttgttttttaaaatttatttatttggaaagagtgtgtgaaatagtataaaccaaattatatttgcccctataaaaaaagcaactatgattcaattaagattttagaagatatgttaaattcaaaaaagttaataatttcaatgattgagcaattgaacatggataaaacatgtcaattgctctatttattaatagggcttttaatgctcattaatattgaaaattgagaatgtagaatgagtaataaattttgttataaggaatttgtaaaaaatgtattgtgtgcattgtttaaagaaaagttaactttcatcctttattctcaattctcaatctataattacaaatttaaaaggtggtgtgtgacattatggaaaaaaggatatctaattcacttcttgaagaaagagaagattttgtgtgttttaaagaagggcataataaaaaatctatgaagtgcgatggtgatagtgtatcaggatcagttagtcaaagagcgtgtgtatattgtggagcaagagttgtattaaatccaataacagatgcataccacatagttcatggacctattgggtgtgctagttacacttgggatataagaggaagtctttcaagtggtgaaaatttatatagaaatagtttttcaacagatttaagtgaacaagatgttatttttggtggtgaaaaaaaattaattgctgccatagaagggataatggaaaatcataatcctaagttgattttcgtttatgcaacttgcattgttggagtaataggtgacgatgttaaggcagtatgtaaaatggctgaggaaaaatataatgtacctgtcattccagttatgtcgccaggtttttctggaaataaatctaaaggatataaattagcttgcaatgcattaatgaatttattttctaggaatattctccctaagagaaaaggaattaatatgttaggagatttcaatttagctggtgaaatatggattgttaaagagtatctaaagaaaattggagtagatgtgatatcaactattactggagactccagttatgccaaattagtcaaagccagcagcgcaagttttaatgttgttcaatgtgctggatccatgacatatttagcaaagagaatggaagcagaaatggatattcctttcgttaaaataagttttgtggggcttgaggatacaaaaaattcattgctcagaatagcaagcttatttggagatgaagaaatgctagtaaaagctaaggcatttgttaaagaagaagaagaaaaaataatgcctatattagagaaatataaggaaaatcttaaggggaaaaaagctgcaatatatgtaggcggaggatttaaagcaatctccttaatcaaacagtttaatgaacttggaatagatacagtaatggttggaacacaaactggaaagaaagatgattatgaagttataaatagtttagttaaggatggaacagtagttttggacgatgcaaatccttcggaattagaaaaatttatgattgagcaggatgtagatattttagttggaggggttaaggaaagaccacttgcttataaattgggagttgccttttgtgaccataatcatgaaagaaagcatccacttggaggttttgtgggagctgttaatttcgcaaaggaaattaatctttcaattaatagtcctgtatggaagtatgtaaaggagagtgaagagaatgaaggaatctaaaagctatgtaaatctaaccgtaaatccatgtaaaatgtgtatgcctatgggagttagcaatgctttatatggaattaagaattgtatgactatattacatggttcacaaggctgtagtacatatattagaagacatatggcaacacactataatgagcctgtagatattgcttcatcctcactaactgaagaaggaactgtttatggtggtgaaaataatttgattaaaggattagaaaatttaattaaattatataacccagaagttataggtattgcaacaacttgtcttgcagaaaccataggagaggatgtagtaaggctttcaaagatattttatgaaaaacacccagatagcaaagtaaaattaataccaatacaatcacctggttacggtggaactcaatatggcggatattttacagctttaagggcagttgtagaaaatgtagaaatgtatacagataaaaatgaaaaggtaaatgttattgccgggccaatgagtagtgcagatatgagagagataaaagagatattagaggattttaaaattgattatatattgctgcctgacttgtctgagaacttagatggagttcatagcaaaaaatataacaggctcccaagtaatggtacaagtatagaagaaattaaatttatgggtggtgcaaaagctactattgaattaactacatttattaaagaagaatattccgtaggaagttatttagaggagaattttggagttaagaattttagaattaatgttccaagaggtcttagagatactgataattttttaaaagtgctagctaaaatatcaggaaatccaattccagaaaaatataaaaaacaaagaggaagatacttagacgctatgattgattctcataaatataatgcagaagctagaatagctatatttggagaacctgattttgtatattcaactgcaagattagctgttgaaaacggagctgttccagtacttattgcaagtggagatgtatgtaaaaggcttgaaccaagcttaagggaagaagttaacgaactttcaaatcagttatttgcaggtgaatgcaaaatcatagatgaggcagattttaaggaaatagaaaaattcgccttagatttaaaggtaaatgtaatgattggaagctcggatggaagaagaatagaggagaaacataagattccattaattcgattgtcatttcctattcatgataggattggtggacagagaatattatctataggctatgaaggatctttaaatttaggggatcaaattactaatgttatgcttgctaagactgaaatgacctttagagagaatttatataacgaatattataatgaagaaacagagataaataatgaagttacagtaattgagggggagaaaaagatggaagcaagagttataagcaaagaagaagtagaggaaaagacaaaaacacatccatgttttagctgttcatcagctcacaagtatgcgagaatgcatcttcctatagcaccaaaatgtaatattagttgcaattattgtttaagaaaatttgattgtgttaatgagagcagacctggggtaacaactgaagtattatctccagaagaagcttttgctaaatacaaactagtaaaatcaaagatggacaacttaaaagttgttggaatagcaggacctggcgatgctcttgctaactttgataatgttagggaaactttgaagcttataagagaacatgatccagaagttacattttgcttatcaacaaatggattgatgcttccattttatgctcaagagctgattaatttaggagtaagtcatgtaactgtaacaatgaatgcaattgatcctaaaataacttctaaagtgtataaattcgtagattacttaggggttacttatactggtgaagaggcagctcaaatccttttaactaaccaattatcaggtattaagtatttagctgatagaggaattatggttaaggtaaatatagtaatgcttaagggaattaatgatcatcatatagaggaagtaacaaaaaaagcaaaggaacttggagcaggaataacaaatataatgcaaatgattcctgtaaaaggaagtgtctttgaaaatatgccgcttacaagtaataaagagataatggatttaagaaaaaaatgtggagagcatattgaacagatgtatcattgtaagcaatgtagggcagatgctattggtttacttggagatgatcaatctcaaaaatttaataagccatcaaatgtaaaggaagttacagaagaaaaaccactaaagtttgctattgcatcaaaaagtggaataggcgtggacatgcattttggacatgcatctgaattttatatctatgaatataaaaatggagagccaagatatttggaaaaaagaaatgttgaaaaatattgtaatggtaaagaagtttgtgaggaagaggaagataagtttgctaagctttcaaaagttgtttcagactgtaatggagtactttgtcttagaattggtgatgaaccaaaaagaaaatttaaaagcatgaatatagaagtttttatgacatgtgaaactattgaaacagctgttgaaaaagcagcagaagctatattaaaaggaactgaagttaaagaaatgctaagagcttaaacctgaataatgagtatatacgccgaaataatgtggcatgcgtttgctacagttgacccgagatttatctggatgattctaaggctacaaagttgtgcccacaatgcttgcctcacaggcaagctgtgaacaagcacatgtggaacaacttataacctaagaatcataaccagataaatcactaaggcaacatttcgcaaaagcattctccattatttctgatatattatagatactcaatataccaggtttaaattaaagtttaataaaaaaggagaaatgaaaaatgattaatttaaaacatcatatttttgtttgtgcaagttgtagagttaatggaatgcaaaaaggaatgtgctattctaaggattctgtaaaggttgtacaaaagtttatggaggaagttgaggatagggatttaataaatgaagtaatggtaactaatacagggtgtttaggcgtatgtaataaaggtcctattgtagttgtttatcctgaaggaacttggtatggaaatgtaaaagttgaagatgtagaaagaattgtagaagaacatatcgagggtggaaaagtggtacaagaattagttatttaaaaataattttatactagtccataaaagtgggctgtcgcactatgaactgctctctgtcaagcaaacagtgaaaaaataaaaatatttgataccgccaattacaaaagtattggcggtattttatgctacagattcggatattctcgatggtataaggtaccatatattttagaatagtattgttttactgtattaacaattcatggtataatgaagagtaattaattgaagccatagagagtaactatctctatggttttgattttaagatagctcctgtccatgtgaaaaaatttagatttgtttttgtttatgaatttaaaaaattgcttagatcataacgaatcaatgatgtaaggagatttgaaaatgataagtataactaaacttttatgtaattctgataattatggagatagcttaaggtatgtagagggcgcagccatagaaaagtatggagttagtccaggaagaggacctgtagttgcttggaactgtacaaaaacttgtaatttaaaatgtaaacactgttatgcaagttcagataataaaagatatgatgacgaacttacgttagatgaatcaaaaaagttcatagacgatttaaaagattttaacgtaccagcattattgttttctggaggagagcctctgatgaaggaaaacattttggaattattagattatgcaagtcaaagaaaaataagaagtacaatatcaactaatggtactcttttagataaagatgtttgcaaatctttaaagaaaataaaccttggatatgtaggtgtaagccttgatggtataggatcaaatcatgatgcgtttagaggtgttaatggcgcttttgacagtgctttaagaggaattagaaactgcattgaagttaatcaaaaagtaggtcttaggtttactataaataaaaacaattataaagaattagaagatatatttaagctaataaaagaagaaaagatacctagagtgtgtttctaccatttagtatattcgggaagaggaagcaaaatggtagatgaagatattactaaggaagaaacaagacaagctctagacttaatcataagtaaggcaatagaatttggtccgagtgttgagatacttacagttgataatcatgcagatgctgtttatacatatttaaagtcattagaaaaattcaaagataaatcagataacatattaaaacttttaaagactaatggtggaaatagatcaggaatggcttttgctaatgtggacttttttggaaatgttcatccagaccaatttacttggcaacatacttttggaaatgtgaaagaagaaaaattcggatctatatggagaaattctgaaaatgaaatattaaatggtcttagaaatagaaaagaattattaaagggcagatgttcttcttgtaaatggttaaatgtttgtaatggcaatttcagaactagagctgaagctgtacataatgatttttgggcagaggatcctgcttgctatcttacagatgatgaaattaatattatgaaataagaaatacaaagggttaaacgagattttatgtaaaggtgagtgaatgcaaatgataatatcatggaatactacaaataaatgcaatttaaagtgcagtcattgttatagagattcaggcaaagaaagtcaaggcgaattaaatacagaagaagcaaagttacttatagatcaaattgcaaaagctaattttaaaataatgatattctctggtggagaaccattaatgagagaggatatttttgaattaataaattatgcatccaaagctggcttaagacctgttcttggaacaaatggcacccttatatcaatggaaatggcagaaaaattaaaagctgctggtatttctgcaataggcataagtcttgatagtcttgattcaaaaaaacataataaatttagaggaaataatgaagcttttagagataccatttatgcaatgaaaaattgtagagatttaggtattagatttcaaattcatacaactgtcatggattggaataaagatgagataattagtttgactgatttttcagtagctatgggagcagcagctcatcatatattctttcttgtgcctacaggaagaggtaaagatataaaagatgaattattaagttcaaaagagtatgaagagttattaacatcaataatgaaaaagcaaagtgaagtaaacatagaaataaagccaacctgtgctccacaatttgttagaattgcagaagatttagggggaaatagtagatttaaacgtggatgtattgcaggaacaagctattgtattattaatcccaaaggagatgttcaggcttgtgcttatttaacagaagtagctggtaatataagagaaatcccatttgatgaaatatggaaaaatagtgaattactcaataacctaagaactcaagaatataaaggaacttgtaacagttgtaaagataaaaaaagttgtggaggctgcagagcaagagctgcatattataatgacggagattatatggcatcagataaaatctgcatttttaataattaaaggcaaggattttatttgacattccaaaactttaagcggggaggaactgctatggataaaacagataaagaattgcttaatttaatgcaaaatgaaattccaatagataaaaatccttttaaaatactaggggaaagattattacttacagaaaatgaagtattaaaaagaataaataatttaaaaaatgaaggaataataagaagaataggtggaatttttaattcgagaaaaattggatatacaagtactctttgtgcagctaaagttcctgaaaatgaaattgaaagagttgcagcatatataaatatgtatgatgaagtaactcacaattatataagagaagatgagtataatatgtggtttaccatgataacgcgttcagaagagaatttgattaatattcttgaagaaataaaaagaaatactggtttggaagaaataatgagtttaccttcagttaagttatttaagattaaagtggctttaaatcttcaaggggatgatacaaatgattagtgattttgataagaaaataataagtagattgcaagaggatattcctataataactaatccgtataaggatatagctaaagagcttagtattgatgaagatgtgcttatagataaaatcagaaattatagtgaaactggaatattaaaaagaataggagcaatactttatcatagaaaagctggatttaaagctaatgcaatggtagtttggaagattgatgatgaaagattagatgaaattggagaatatatggcatctatttctgtagttacacactgttatgaaaggaaaccttttggttcgtgggattataatctatacacaatgatacacgagaaagataaggaaagctgtaacaaaattattaagcagatagctgatgatataggaattgaaaattataaaattttgtatagcacaagagaattaaaaaagactagcatgagatatttcaaataaaaaattagattaggtatatattttatatatacaaatcattggttatatgataagatgagtataaaatagcatattaacgaagacaatgtggtctaaaaccaaactaaaaagttttgttttaggctattttttgttggcaaaggagcctgtttaatatatatagatatattaagtaggctccttttaggtagattatattcacatgtagaaaaaatttgcaattaaaaaggggtggaattatggatgaaagaaaaatcgaaattatagataggacaataattgttttgagagaaatatttggtgataagttaaaagagaaaagcgcacaggttagagaattaataaaattactatatataataggaagcgattatatagaaattactcaagagctctatgaagaactatcaccattgcctcaagatgtaaaattcataatatctaacaataataaaattgaaatagaaagtgttaatgtattatatgatatattaaacaataagctaaacatatataacaaaatgaatgcaagaatagtaggaattgatgacattatcttttatgattatcataagatttttttagagataataaagttctttggaaataatatagagctaagtataaaaaataataataaatcagctactgcgatgagtttagaatgggttaaagctggagggaaaaaagttgtaacgacttttgcaggaattggcggctttgctcctcttcaagaaatattaggagggtcttcttttttagaaaaaataaaagatcatagtaattataggctatttccgaaagtattgagtatatttgaagatattaccgaaagcaaaattcaaggaaatgcaccttttataggaaaggatattttcaatgtagaatcaggaattcatgtaaatggcattgctaaagattcaagaacttttgaaccatatgatcctagtgaaataggaagaaaaagaaatattattataggtaagcattcaagtgtaaatgcattagaaataaaattggaagaactgaacataaaatatgagcatgataatttaacaattatgttggaagatgtaaggaaattgagcacacaaaagcgtggtggattaaataatgatgaaataaaaagattatataagaaactgtgtatttagattttataaggtggtgatatattgatttgcaatgaaaaattggataatgaaatatatattgtagatacaactttaagagatggtgaacaatgtgcaggaaaagctttttcaattgatgaaaaaattgaaattgcaaaatatatggataaaatgaagatttatcagatagaggcaggcatacccgcaatgggggatttagaaaaagaatgcattaggcggatattagagataagaaaaaattcattgatttccacttggaatagaatgaataaaaatgatatatttcactcaatggagtgtaagccagatattattcatattagtgttcctacatcggatatacaaatatattcgaatttaggaaaggataaaaagtgggttgaagaaaatcttaaggaatgtgtatttttagcaagggacaaaggttatgaagtcactattggttttgaagatgcttctagggcagacattagctatcttataaatttatgtgaaataattatggctatgggtgtaaagcgggcgagatatgcagataccgtaggaatatcaatgccttcacttataaaaaattcagttaaaactttaattaataataccggaatagaaatagaaattcatgctcataatgattttggaatggcgattccaatttccttagaagccgttaaaagtggtgctaaatatgtggattgcacgttaggtggaataggtgaaagaacaggaaattgcaatttacaggagtttttgaaaatatcaaatgcattcttaaaaaggaataaaaaaattgagggattgatttagatatatatgttgtaattcacaatgcacattttacaattcacaattatggataaaattcttgcaatatttttagaattatcatgaagaattatttttgtaatatatattgtaataataaatttgtaagtggaactctattgagctgattacattaaatgagaataataatgtagaaactcaattacaacatatatagcataagacatttctaaatacaattattaaaattatatataaataaaaagatgagcttgaaaatgtagatattatttcaagcttattttattgcgtgggaaattatggatattaaactaagacctgaacttatgcatatatctttccgaaagtagaaacattgttatttcgcaggactatgaaaactttgctgaaagtactaaattgcaggttgtaccactaatgcatgctcccaatttcatttgctgcttgtcatgagcttgcctcaggagcatgctaaagtggatacaacctgtttcttagaaccttcagcgatattttcatagcttttcggaacaaaatatttatgatttcggtaagttatcacattaatctaagtttaaagctagatatctatatggataaaccaattataagctagatttatactatgaaatatatcccaactagaaataagaattatgcttttgtgaaatgtttcattaggaatttgatggctctgattcttagattaaaagttgtcccaagtatgctagttcaaagcttgcctttgaggctagcatcttgggtacaacttgtgatcttagaatcatccatcataatttccttagaaactggaacaacagcataatccttatttcggcgagctatacgcataaatctaagttcaaagttaaatatctatattgaaaaaatataagttgcatagtattatttataaagtccaaaataataaatgtgtttaaataaaattgtgttataatttattacataaattattgtaaattggcgggtgaacaagatgaagttggcagatgaaaaaaaacaaattatgagcaaactaaaaagtgaggaagtaaataatcttctagaaagatatggcatttcgagtatgctcacttttggaagttttaacaacgatgatttcactcaagagtcagatatagatatagcagtaataggtatagaaaagatacctttagataaaatattagaacttgaattatttttagaaagaactttagggaaagaaattgatgttatagatttaagaagtagagaattaactatatttttaaagataaatgtattaaatgaaggtaaaattatatattctaatgataataacattattttagaaaagtataaagaagaagttgatataatatatagagaaaatgagaatttcttttggtttagaagaagggatgtgttgtcatgaatcaagaaagacttataaagatagttgaagattttcaagagtgtataagtgatatcgatgaatgcattgagatattaaaaaacaatagtgataacaaaataatgattaagcttgcaaaatctagtttgagacaattatttgtaagttttaatacaatactagaagactttacatcggtaactcttaagtcattaaaaaagtataaaataggtatgactttaaatgatagtttagaagttttaaaagaggaaaaagtacttgatgctgagttgtttaactttttagagaagtcaagactgcttagaaatagaatttcacatagatataaagaaccagcacatgcagaattatttgagcatgttgtaaagtataaagatgattttaagaaaattttaaatattgcaaaacagtatttaaaagagtaagtaggggaagagatgctagaagatttaatcagtgttttagataatgtaatatatttagatatagaaacaactggacttgatgaaacatgctcagaaattatagaaattggagctgttaaggttaagaatggagttataactacatataatacattaataagaccaagaggacgcgtgccaataagtatttacagtctctgcagtgatctaaaggaggcagatttactaaatgctagaagtttgaattctataaaaaaagaagtactggagtttttagaagatttacctttaatatgccataatgcaaattttgaaagaaaatttttatctttttatattcctgaaataaaaaatacaataatggattctatggagcttgcaataattctagaaccatggagaaaagaatataatttaaattccttaattaaagaaattactaatttaaataaggatgagttacatagagggctatcagattcaatagacaccttaaaagtagttaattcactacttttaaggcaatggaatagagaagaaaatagcagaaaaaagaataaatctctacataatctaattattaaagaatatcagtatttacaaaaatggccatggactaagcatttattgaaacctccttttttcattgaggaaggttatacatatgtaaattacttagagaacaaagaagaggaacttaagctaaggaaaattcctatagattatttgaaatatgaagatttacttgaaaatgaagagatatggaataatggcggagattttggataccagtatagaaaagatcaaaaggaatttgcaaaaaagataagagaaaattttgaaaaaggtgagaggatatttatagaggcaccaaccggaagtgggaaaacttttgcgtatgtaataatagcggctattgaaacgtacctaaataagcagaaaaatagaaaagatgatgctagttttattatatctaccaatacaaaggaattacaaaatcaacttattgagagagatattccgactatacttaaaaaattaagattagatgataaattaaattatggtgctatgaaagggaaaggaaattatctttgcatagaaagaataaataaatgtgaagaatttcagatggatgaaaaagggaatctagcattactttttctaaggagactttgtgaaaatggtaattatggagatatagaaaatataaattatctagttcaaaaacatttggaattggataagtacataagggaagttaattgtgatagtgaacaatgtaagcttgataaatgtacaagggcttgctttttgagaaaaaggtataatgagctacctgaggaaaacatcacagttattaatcattctcttttagcatgctggccatatactgaaaagaaaaaaattaaccacataattattgatgagggtcataacttaatggaaaagtgttatgatttttttgctgaggaattttcgtcagctgaatttatacaattgctagatcttatagaaaaaggtcacccgagtattatagctatgcttttaactttaaatgccagctatggttatagggaaaccatagaaaaagataaaattatgtatttagcaaatgacattatagtaaatataaatatattattaaatgattttagaagtataaggcttgttagcggggaatataattttactactgaatttttccttccaagagaagatttaaaaggaataacaaatgccgtaggatctgagatatcagttttgaaagaaagtatatatccactatataagatgttaaatgattatatttataatataactttagatgacgaaatagatggagatattgaccacaagaatttatctgatttcatagcaaagcttaaaagtgcatttgatgttttagataagtttttagaaagctcagtgttctatgcaaaaatattagaagtagactcagaatataaatcattcacacttaaaaatgttcctttaaatgttggggagctagttaatgaacatatgttaaaagatgttaaaagtacaacgttcttatcggcaacattgagaatagaaaattcttttaataaaataaaaaagcatttaggacaggaaaaggcaaaggagtttataattccaccaacttttgatttaaagaaaaggactaagatatttgctttaaaagatgttggaaggtatgatgaaccatcatatataaaaaatgtttccaaatttatttataatgctgcattaaaaataaatggtcatattcttgttttattcaataataatgcaaggagaactgctgtgagtgaagagcttgaactgcttactagaggaacaaaaatagaagtacatatgagcaaaaaatcagtaagagctttaaatgataaaaataggcaggttataatacttggaagcaagggcttttttgaggggatagatgtacctggagacgcattaagctgtgttatgttagataaaattcctaactatagtccagaatatcctattttaagagcaattactacataccagaagaaggggtatcaggatgtgaattatccacaggtatgtattaaagctaagcaaatatatggaagacttattagaagtacttttgattatggatattttataattttagatccagggcaaaactcatatactataagaaatcttgaaagagatctaaatgggccaagtatagaattttcatcgactgctaaagtcctttcagagatggagtttgattataataattggagaagaaacaatattaatacaatcataaacaacattaagaaaagtaataaaagcattaaagaggaatttaacaatgaagcaaagaagcataaattattttgggaattactaaaagttgaaaatgatatgtattattttgaaaacattaattttaaattaaatggtaagatttaaaattaaatttaagtgataacttacagaaatcataaatattttgattccgaaatctatgaaaatatcgctgaaggttctaagcagcaggttgtatccacaaatatatttatgatttctagtgaagatattaaattaaagttttagcaacaaatatgtctatctaacaaatcaaattcttaaatcgtttatatatattacaattataggatgttttttggcaaattattttgataatggtaaaatttttagaaaaaatataagctttaaatgtaatatatgctataataaacgtatataaatataaagttgaaaatttattatattttcatacggaggtggtaataatataaataaagtaatttattttacaaaataagaaaattataatttaaagattgaataaagagagggatgtgaagggtatggtagaaaatataacacaattattacaagaatataagagtacaaaggaatccttagaatgtgggttaaaatggcttcctaagaatgattatgctaagtctaaaatcgaagttataaatatggtcataagtgatctagaacaattagaacaacaacttagttaataaattaaaagtattaaagtgaaaattataactttaaagtataaaaaaagttattaacatataataaaactgcctcaaaactgtattttgaggcagttttatttatatatgttgaaattcacaattcacaattcacaattcacaattcacagttaaggctatatttattcaaaacatttaattcatgtaatttttcaaaatgttaatgtttattgataaagatgaaaagatatatgaattgtgcagtgttatatttagagtagaatggttaatttaaatggaatttaaagagttttagatttcttcgtgtgcacgtgaaaatctcatattaggatcagtgaatacaagtattgctatttaataatgtgtataaaaagattaagttgtctaaattaaaaaattaatttaattaaatatatatatgaattcttttgggactaatagaaaatattgacgaaattcactataattagtataattaaagcataaatatagaaaaacaagaggggagtagagaggtacaaacatgaaactaaaaaataaatttattagtatttttacaatttttgctataattcctttaattatatcaggtattatagtaagttatgttgtccaaaattccaataaaaatgatgcttatgtaagattaaatgaagaacttttaatagctcagaattctatgcaaagtcatatagaaacgttaaagaacattgcattagatagtgaaaatgatgaattgcttatgaggtatttaaatgaaaatacttcaactgaactaaagaataaagtatcagacaaatataaaaagactatggacaagtatgatgtatttgccaatataattattataagcggtgatgaaaaacgtttaacagatgcattaaaaagtggcattgagaatactgatacacctataccagactatgtatttaaaactaaagaaacaaaacaattagtagtttcaagtattaaacaaagcaacagcactggtaagcctatatttgcaatatgtattccaattttaaatggtgagaaacagatccaaggttatgtaacatattcagtagatttagaaaaattatctgaaagatatgtaactaatattaaaatggggtcatctgggtatatttttgttttagattataaaggtacaactgtaatgcaccctaataaagaagaaatttttcaaaataatatatctaaaagtactattggtgaagaaattttaaataaaaaaacaggaattggcgaatatgagtataatggtgtaaaaaaaatagcggcctataatgaagataaagatatgggattaatatatgtgactaatattccaactgctgaatttactggaactactaaaacagttatgaatttgatgttaattataggtttaattgcattaattgtttcaagtattatttctttaataatatcaaaaaatataacaaatcctattaataatgttgttagatctatggaaagtatggcaaaaggtgattttacaactaaagtagatattaatagtaaagatgaagtaggtataatgggaagaaaaataaatgagactatggataaattaaggctctcaatagttggagttcaagaaaatagttcaaatgttgagagtatgtcatccactcttgcgagcacttcaaaggaaatgactatagctgcaagcgaagtagcttcagcagttgaagaaatagcaaatggagctgttaatcaaacacgtgaactattagatatcactaaacagctagatatgtttaatgctgaattaaatgatattcatgataaaatttcaaatgtaaatataagcagtaaagatgctgaagacaaagcagtactcggaaaggattatattgagtcattgacagaatctatagctaaagtaaaacaatctttcggaatagttaatattaagattaatgggttaggcagtactgtgagcgaaataggtaaaataacagattctattaatgaaatttcagaacaaactaatcttttagcattaaatgcagctattgaagcagctagagctggcgaacaaggtaagggttttgctgtagtagctgatgaagttagaaaattagcagaagaatctagtaaagcttctggtgaaatcatgagcctaataaatttggtaagtaaagaaacagaagaagtaattgatacatcaagacaaatggatggtttaataggagaccaagcaaatattgttgaaaaaaccattcaatcatttgataatatactagaatctgtgcagaacattgctccaatgatagatgaaacttatagttctgtaaaaaatgcaattaagggtaaagatatagtagttaataaaattgaaggtatagcatctgttgcagaagaagtatcagcatcaacagaagaaatatcagcatctgcagaggaaatgctttcttctacagaggaagtttcagatatagcctcacaattagatgaatcagtaaatgatttaattggtaaggttgaaggatttaaagtacaataagtaagaagataaggaaactgtaaacaagttatattgtgtatagtttccttaaatctattgtataagtgtggcataagatgtgttttaagaagggtatcatctagcactaattttgtgataatcgggtattatactaaatattgcacttaattatgggggtcatttagaaacaataaatatttgaaaagtagtatgtaaattagtgaaaaaactaaagttagaaaagaaaattttttaaaagtgctatcacttgctactgatatggaaaaccatatcataaatgaaaaattacttcatattattaatatcaccattaagttaataatacgaatttgagacattagacgtattaaaatatcctagtaaagcttatttatgccttactaggatattttactgctattttcaaaaatattaagggtgctaaaaatttttatgtttaccataaaagcaataacacacttttggtattataatcagcgtaactttagcttatagtaattaaattcgttgattatttattttaacagatttaatatttcgtcttctgaaagtgaagaatcgcaacgaacatctatttttctgtttttactaacaataaagcctggtacagttacaatattatatttttctctaaatgaatcaattgaattatctgaaaagttagcactatccacatagtaaattgttgtgttgattttattagtcaagccacttaattttttagtaaatttacggcagaatgggcatgttgcacgaccaatgtagatagcagctaggccttcattagataataattcctctgcttgtgtagaaagcacttttttaaataactttacattctcttcatagctatctttttcaaacatttgtatcctccttgtttttttataatagtatatcaaagccaaattattaaatcaatttagttagcttttctagtagttattttgtgaaattatagaaagtattataaaagaaaattctaggttaagagatgtaaagggggttaaaaatggcttagtatgtctttatgtattaaaaaaagaatattagttcgtataagtagagataaataagtcaatattatagaagaactactaagcgaggtagtgactatgattaaagtattagatccacaaaattatgtggtttttcacaagttatttgggatgaaggcacataaaaatatattgattagatttttgaagtctatattaaatatttacaagatatgttatcgttagctgaaatataaagtgtgattcaccgaataagtggatataaaagggagaattattatggaaaaagaagatcaagtatataagatattattgatgccaatttattgtgataagaaacaaaataaaatttcacgtgaagataataaaataaagacaggtcaaaaatatcgttcaatgcttgatgaggatatgtctgactttgctataggtttttatgaaattatatataaagatatgctaaattcaaagcggatattagagcagaatggttctttgtataataatgaatatgctggagatacaatgaacagctttaataccattgcgaatatcactcctcaagcaggaaaatctagttcaaaaagaacagataaggaagaatggccagaatacttacagaattatcatagtaaatatcattgcctggcgaatttctggcttcttccaatggaaattgggcgaacgacaaaaggaaagttaaataaagcaattaaaccaattggtgattatatggatcgctttttagaaatggtgtattcggaagttaggtttgatgaatctgactgcagtaagtatttcagttgctttaaaaattggagtgatttcactgataggcatttcctgaaaaatagctatttagaccagaagttaaaagttgatttgtatagtaattacaacgaagatagaagtgagtattttatagaaaaagcgctagataaaattgaacaaagggcgaaatgtattgcaaaatcaaactatgctgaagaattgtggaattactttaataagtttcagcttttttaaaggagcaaggtttcttagaattccaatagttatcaaaaggtaggggatttagcttatttataatttagtaataaacataagataattgttgtttaatagcataaagaataagaaaaaatatatattgcaaaaataagtcttgatcataattctaaaatatttcaagaattttagctgtaattgtgcattgtgaattacaacatatatattataaagaaatgcatgtcaagaattagtacatgcattttttagttgaaataagcaattaattgcctatttcgtaattacaatagtattcaacttagtttaacaaagaatgaattaaataataaaccatatttattaacatattgattggatttggaaaatatagtataattgtatacaattacatggtttaaaagcaaaaaaatgggttttgtgaaaatttatgaaagctggtatgagaaatgaactggataataaaatttaatcaattagaaaaagaaaataccgacaaaacattagacattttaggaaaatatgataagtacaagtatgagctgttggatgatgtgtatataaaagctcacaacttaaaatactcaattggtaaattaatagataaattaaatgtaaacgctattgtaggtgatccattaaaagaagaagtagaaaaactggttaaagattatattcaaatgaaagatgattatgaaaatagcagagataagatgaaagaatatatgtacgtttgtggaagtgaagcagcacagctaaaatgcactatgattcaaattgtaagtagatttataactacaaagaaagattttcttatgtttaataggagaatggatatatttactaaaaagcttattaatatgtacgctgaatttgatatgggatcaatgggtgacattgaggtgctgcaagacgtttattgggatcttatgacaattaaagacataattgatacaagaaataaggaatatgatgagagagtagaattattagaaaagcttaaaaagaatcagaaaaaagattattttaagatatttgattataaagaaatgattgatttagcagagaaaaatgagtacaagcaggtaaggcaaagcggagatcatattattatgcagcacaataaaactaataaaatagtaccaattcctgctcatgaattaaaatatgggttaatgattcagatacaaaagcaaattcatgccaataaagcaagttaattaatttagaacataaaaaatagaagcttgtctattaaaaaactcgactcacattcgtttgctgagtaagttcgagaacccaaatataaaatttggactctcacttaaagataagtttctatttttttgccttaatttgacctaagctaattcatatttagtaatttgtctttgagtcaactgagcatctgccttatcaacatctttttgaacttcaatactaagtgacgcagagttaggaactttatttacagccatagtgtttacctcctttattttattttattttcatagagcatatatgtacaaaattgaagggattcctatttttgtaaaaaatatgataaaaatagagaaattaaatggcaattaatgaaaaatgaataccttataattggcaaaatatgttataattaattgatgaataaattataaattgtaatttttagattgatgatgttaataattgtatacttaattttaaatcaatcaattacattgtggaggggaaatatgaatattactggcagtatgctttctaaatgggaaactggtaaagcaagtcctatatatgatcacttaaaaagattagctttatattataatgttactacagatttcctcctaggctttaatcaagatgaaaaattagagatgggaaataataataataataatttagataaaaacggaaaatttcgttgttctaaaaaacctaacaatattaaacgtttagtaaaactattggaagatgataaaattacaaataaggatgtggtaattttataagatttggttcaggttttaatatccaaaaaacataagaatctctatagataaaaaagtttgaattaatttatgcatataagatatacggtttcttaaatttaagcgttgtgattatacaaaggggatttaaatgtttaataatgaattacttagcgatttaataaaaaaggcacaaggaaatatttcattaaataattttgctaggcaatgtaaaattagttcaagcactttatcaagaattattaatatgatgaattcttgtgcaccatcaccaaacacattacaaaaaattgcagcttgtgcgagcaatggagttacatatgatgaacttatgaaagcagcaggatatatagctccaaatgaaaatataaaggctacatcggaaaaagaggatcacatttcatcagtagtggttgaaaaagagattgttaaaatatttgatgagttaaaagaatttatattaactaatgatgggcttataattgctggtgatccactatctaaggaagcaattgaaagtttaattgaaacgttatcttatggcattaaaatagcaaaaatcataaatagaaagtaattaataaatttaaaaagaaataataattatagaaaataagaatacaggagaataactatggatgcaataaaaattatattgcatataaatcagatacaaacttcgttgatatagtgccacaaaaatcaaggcttaggctttcactcaatatgaaattcagcgaaattaatgataaaaaaggtttgtgcaaagaagttactgataaaggtagatggggtaatggagatatagaaattggattagaaaatgaaagccagttagatgatgtaatggaacttataactcagtaatttaacaacaaatggattaaaggtctgtgtataacacatggtttttataagatactacaaacttaaaaaataattaaaagtataaacaattttaggcaataaacatcaaacttataatgtttattgccttttttcaagctacatatgagaatcatcacaaaatccacctgaatctataacaattccaagcttggttgatattatggtatttagtttattaattgaactagataagttgttaatttgtttttctaagcgaattagcaaatatgcggcaacagcaccattatcattaatggatttgcattcagaattagtttgaatattataaatatcagaatcatcataaaaagagaaggaagaaatgcagtcacaagttaaaggagcttcactagaagagccaaacttcaccttcatcatattcaaaatcacttttaggaatctttgaggctcttttccagccataagttataagtcatcctttggaagtttgttagaagtatttttatgtttacttttaaaagatatatggctaattattagagattctaaaattcctaagaatttaagaatataagaatttatatttttaagaacttaggaactttagaatataaaataaaatccgactcgcatgagttcacgttttgaatagtataaagcataatcaaaaaataacaagttcacctggcagtacatttgaatttaataatgccaatacaaaaataagagctccaagggtaactttggagatttagtagcggaatacttaaaagaaaaaggccatggagttaatttgcttaggattgataaaagtgatagttataattgtgaagattattttacaagagcaaatgaggataatgaaatagcaaaaactttagatgtagaactatatgtggaaattcatccttatgaaagttgtagataataatccatatatggataaatacttaaaaattaattcaaaatactatttaacattattgtaatacttggtaaaatactacatataagttgaaatagtttttagatatctataggagaattatgaaaaagattaagtttggtaattttataaaaaatatattaatggtattattaatagttcttatacttagtggacaaacggttgcatttgcaagatcaggaggtggaggatcaggttcatctcatagtagtacatcttcttctcacagcagtagttcatcccatagcagcagaccattaactagaccatcaaaaaggcctacgtttatggaggcaataataattatagtggtagtaattattgctattatttctgtacctataattgttcgaaaagtaagattaaatagaaagaagcatacatgtatttcagtaatgcagaatttatctaaatatgatggaaactggaattataataatttaatgaaagacattaaggatgctttttatatggtacaaaatgcatggagagaaagaaatcaagatttggcaaaggaatttatgagtgaatatttgtatggtaaacataaatttcaaactcaggagatgaagctgttaaaagaaaaaaacattcttgaaaatatggttttacttgatgcaatacctataggcctacaggatttaggaggaattgataaagattatatatgggttcatataaaggcgaaatgcagagattatacaataaatgaagaaactaacaagataatagagaaaaaatcttcaaaaagcgattactttgaagaatattggaaatttataagaaccgagaagagatgggtattagatgatataaaacaaatagatcagataacaaatttgagtttttttagaatagatgcacctaataggtatcattaaaattactgcaatcagtattttataaaaatttgaaaaagaaatgataatctatggacttattaaacccaactttaaaggcaatgttatttgtagaaggaattttgatgatatatttattatttagattgaatatatactatactgtctggtaatatgttataacttgtaagagccacacacctgtcaacttctataaatattattttttataacttgttcagctttttttatttaggataaaaaaattggaattttaaattaggccctctggggtaatagtattgagtttacgaacgacttgctatccgatataaataacaatattaagcaagtaaaaaaaacaatattcagtacgataaccatactaaatattgttttttaaaagagcataacaatcttaactagcacaataaaagatagtttatcatcatataataatctttcgactaataatacaacaaatcacaacctaataatcatggtttgctccaccaaacaacatatttactcaactcaatataacctcacggctatataaaatcaattcaacacattgaataatgttaactcgaccttaaataataagttggagtaccattataatagatataaatcaactataataaaacttttccccatcatataaaatcttatcgccgactaatataacagccataatattatgaccattatataatctttgttcgactcatatacaccctaactcaagagcatatataaatctttgctcaactgttatgttccttataatattactatgtgcaatttcagttatagtatacataaaattaaattgcaatttatggaagtagatgagaactattttctagcaatatgtaaggactttttctttgtttttaacttctatgtcaaaatcaagaaagagaatatttttaattatttagtgcggtaacgctatagaatactatgagttatttgtgcacaatgtcctattgtattacggcatttataaagaaaacccatatttcaactgaaatatagtataatgtttgttagaacaaaagaataactatatattttgtaattataaattcacaattatttttacaatatatatgaagaaagacagagagggaaaaatgaagattgcagttactactacaagagatgcagatgagagcttaaattataaagcaaaaggtgtatctaaagatttaaacatatcatatataaaaagaggtaattttagtatcaaagaaacaattttgaaagatggttttgactatttattagtagttgaaagagataagattgttataaagggagaagatagtgcactgttttggcatcctaatatgtcagaacttaaggttaaatcaataagacaaggaaataaggaagctataatagaggcaacaaaattagaagaaggaaatagtatattggattgtacattaggtcttgcaggtgattctcttgtcttttcggcagttgttggagaaaagggatatgtagtagggacggaaattaataagtatatagcttatttaagtaaatgtggattagaaaactataatggtgttaatggtaaaactatagataatataaaggttgttaatgaatcatatgaagattatattttaaagcaaagagataatagttttgatgtagtatattttgatcctatgtttaaagaaccaaatagaaagtcaacatcaataaattcatttagggattttgcagatcacaaaggggtaacaaaaaatattttaatggaagcacttagagtatgtgcaaaaagagttgttattaaagaaagacaaggctctaatgattttgaaaagctaggaatagaaaaatattatggcggcaaaaaaagcggttcaattatttatggagtaattgaaaaaaatatataagaaatttagatataaatgagaaataattgctcacgtgaagaaggaaataaatcttgtaattcaatgctaaatttatgtaatgactgttttagaaaaaaattgaatgaattttaacaactatgttccctaacacgcctacgttgagacagttgtgaaataggctgataccaaaggttttgaatgtttttaagtaaatattgaagtttgttttttgttccctcagactattaggtttggggggattttgcgtaattgtgttttactgttccatcaatattaaattcatattcagtattaaagtacttctgcttttcacatagagtatagattaaaaagctgatattttaaagccgataaataaaggagggtgaaaatgaaagtaaatggcattattatacctcaatgctcatatataaaagtgtaaaaaaagtcgaatgtatggtataatttgtattatatagatgattttttatataagaccttgacgggtgacggggaggacgaaatgatagatttaagcaactttgatgaggaacagactaaaatagttcaaccagaattagataagagtagttcagctacagaaaccggggatttttatgttgtgggtattggagcatcggctgggggactggaagcactggaacagtttttcgcaaacatgccacctgccagtaatattgcttttgtagtaattcagcacttatctcctgaatttaaaagccttatgccagaaatactatccagaaaaacggaaatggaagtatatcagataaagaatggaatgaaaatttcaccggggtgtgtttacctgaaccccccaaagtttaatgttaaaatatcacaggggcagtttttacttgaagaacaggacccaatacacaagattaatctcgctataaacactttttttgaatcactagctgaagatataaatgaagaatccataggaatcatactttcaggtacaggaagtgatggtacacggggggctagggcaataaaggaagctggcggcattgtaatagcacaagatattaagactgcaaaattcaacggaatgcctaaaagtgtaattgccgccaatatctgcgattttattttatctccctcaagcatacctgaaaagttgctaagatatacaaaccaatcttcgatgataaatgtaatagaggacgaagtggaaaaggttgatgaaacaacggatattttattgcaaatttacaatataattaaaaatttgcattccactgatttcagcctctataagcaggggtatgtccttcgatgccttaatagaaggataagaatatgtcaaatacaaacactagaggggtatctttcgtacttaaaggaaaatcaagaagagattgagtgtttatacaatagtttattgataggagtaacaagattttttagggacttcaatgcttttgagctgatgaaaaatgaagttatccctgaaattattggcaagaagacagacaatgctgttgtcagggtttgggtggctggatgttctactggggaggaagcatattcacttgcaatattatttaaagagtatatggatagaatccaaagaaatataaatataaagatttttgctacagatattgacattaaatcaatagaatatgccagcaagggagtttatccagagagtatctctgaagatgtatcacttgagcgtttgaaccgttacttcataaaaaaaggggacggctaccatgtttcaagataccttcgtgaaatgattattttttcaagccataacgtaataaataatccgcctttttataaagttgatctcttaacttgtagaaatctgttaatatatttccaacctgatcttcaaaaaaggatcatttcaacttttcagtttgctcttgaaacaaatggatttatgtttttagggacaagtgaaactaccggagaaatgggtaaatatttttctacctttgatgcaaagtggaaaatttataaaaagaaggatataaagaagcgtccactcatagacgatttttccgttatatccacaggtataaaggtaattaagtcaaaacctgaagaagattattttactccagtggaaaggaacaagcgagaaatggaagatatcaatacaattttaatagaagaatgtctaccaccaagtgtgctggttgatgagaatggtagacttgtacaaatttgtggtgatgtggataaatatttgaagatgcctaggggaatgatatgctatgacattcaaaagatggtgcctaaggagctatcaactgctgttggaactgcaatcagcaaggttagaaaagagagaaaaactgttgcttattcaaatattaaagtcaggttagcccgagaagaaaacaacattaatcttgttgttaaacctctgtttacaaagaagagtggtttacttattcttgtaatatttgaagaaattaatagtgtcggcagccacaaagactatgttgaagattttgatacagtaagtgaattacatagccgtatagctgacttagaacaagagcttcagtataccaaggagagccttcaatcctccatagaagagttagagacttcaagcgaagagctccaatcagccaatgaggaattgttggtttcaaacgaggaaatgcatagtaccaacgaagaacttcaatccgtcaatgaagaattaatggttgtaaacacacaataccagtataagctacaggaactggctgatttaaataacgatatgacaaatttcttaaatagtacaactataggtactttgtttttagatattaacctacgtgtaaggaagtttacaccagctattgcaaaggaaattaatcttatagaacaggatatcggccgcccaattggccatatagcacataactttaaaaatgaggatttaattgaaatatcccgtaatgtgatggataacctaatttcagttgaaaaggaagtaaagagcataagcaataagtggtacatactaaggtattctccattccttacaaatgaaaatgttattaagggtgttgttatctctcttgttgatatcacatctcggaaggaagcagaagaaagtcaacgtaaaagtaaagaaaagttacaggaggcaatttcattagatcaattgaaagctgatttctttagcaacctttctcatgagcttaggacgccgttgaatgttattatgagtactttgcagcttttagaaagccaaaggaaagctataggggataaggatgtagctgataagcaagagaagtattttaatatcatgaaacaaaactgttacagacagttaagacttgtaaataatatgattgatagtacaaaaattgattcgggtttttttgaaatctgtaagcagaatcataatattgtagagattgttgaaaatattacattgtcagtagcagactatattgaaaacaaaggcatagaactggtatttgatacagatgtagaagaaaagattacagcctgcgacttagatggtattgaaagaattatactaaaccttttatcaaatgcgataaagtttactgaccagggtggcattataaatgtgggtataaaagataagggtgaaactattgaaatttctgtaaaggattcgggtattggtataccagaagataaacaaaagattatttttgaccgctttaggcaagtagacaaatctcttactagaaatcatgaaggtagcggtataggactatcactagttaaatccctagtggttatgcatgaaggtaaaatttcagttcaaagtgaatatggtaaaggaacagagtttctcattgaaataccggtaaaaacagttacagaagaaaatactgcaataaaagcagaaatcaaacaagagggaaatgtggaaaagataaatatagagtttgcggatatttataaattaaaaaagtaattactatgtatcaactaaaaaaatccagatagatataaattcatgattgtattaaaataaagccttggttttgactatttatcacataaatggtgatactcaaaagaaaggactttatgaaaggtttaaataataattagtttagtgtacaatgggataaatattaatcatagatgagaggaaattgaaatgaacggaacaaagagaagtaatattaaaataggagcaacggttttagttgttcaaaagcaggatcaacgtacaggaaaattgacagaaggaatagtggcgaagatacttaccaattcatcagagcatcatcgtggcataaaagtgatgcttgagagcggtattgtgggcagggtgaaagagataaagtaacagttagtatataaatatttatcataaagatagtggtgttatatatgaaagtatggagtgctgtgagtcaagcatttaagaacttgaggtttagtataatagaatacagtgaatattattgataaaaacttaatgaaattggcacaataaaaatggggctgtcgcattagtggattaaaatccgttagcgatagctcctttttcatttatgtaaaatattttttatgtgtcatatttctttaattgtaaaatttctaaaaatggacgaactttaataagcctatcaaaaaaacttttaaaaattatagttaggctgttttctttaattcaaataaatgcttaccagttcggtctgcttgtatcttgctatgtagtttgtttatattatgtgccatagcaagaagtatgctttctgctaatacatttttttgcccacgacacataaaccttctaaaattcatgtcttgcttaatttgcgcaaaagatccttcagcttgaatactcctatttaccctaagtagacatccttcatcacttattattctttcaaaatcttcttttcgttgacgattgaatttttttgatgtctcaagtcttttggttctctgctctaaaggcgttttagaattatttccttttatgcatttacttttatgactacaatgactgcaatcttcgcaaatataaattgttttttcactttcatatcctgttttagattttgtgatttttattccttccttttttaattgcttaccatttcggcatgtatataaatcttgcgcttcattgtaattcatattttctagcttaccgatatcatttttaaattttcttgtttttgatatttcataattagctggtttaataaatgacctttgtttattttcttcaataaatgaataattttcttcgctttcatatccagcatccgcaactatttttagatacttaaaatttagtctttcttccatgattttaagaaagggtataagtgttgttgtatctgttggttgtggaccaagtgtgagccacacaatatattctgaatctacaccatgctgcaaattataagctggttttagctggccatttttcatggcatcttctttcattctcataaatgtagcatcaacatcagtttttgaataactgttacgactaccgcaagtgtataccttttttgtgtattcttttaatttttcaagacattcttcaagggtttcaattgaacgttgtagtggagtctttcttttcccacacccgtgaacgaattctatatcttctgatttttttaatgcataaagtttttttctaagtttttttacatgtctcatttggactacatttttatatacaaccttgatgtcataaagagtttcacaatctttaacaaggtcggctattttgactaatagttttgccatattttttgtaacagcttttttccaaacgaaggtatatttatttgcacaagcttcaattttagttccatcaataaatatagtttctccagagatttcaccgatatcataaagaaaattgctcatttccgcaagaatcttttctgcgtatggagcaaaatgtaaacttctaaatcttgcaaatgttgcatgatccggagcggttgcatcctcaagtaaaaacataaaatttacatctctacgacatgcattttcaatgtcccgagatgaatagagtttattcatataaccataaattataattttcagcatttttcttggcgatacttgattttcccttactcgggaataagtcgaatataaatcttttaaatccatctcctctacaaattgacttagtaaacgcactgaatcattagctggtataatataatcaatatttaatggaagctttaattgataaagcttctgattaattgtataatctttatgtaaaatgttttttattagcataataatattttactataaatctcaaacacattcagtttgggatttatttttttacgtaaaaagagccgcgcactaattttttagtgcgacagccccattttttaaagtatccataccggtaaaaacaaacccaataatctcagaaattagaagttcttgagggattggtctattctgaacttcccatttgtaaattacattatacatagaagtgctcatcattgttgcaactaattgggctcgtatttgttcattttcagctaattcatgttcttttataagcaatgcataaatcttagaatatagctcacaagatattttatctcctattaaaggtaaaatagaggcaaaaccgcatttgcagatgctttttaccatttcgaagtactcacaaatgcaaagaatgaagattcgtatagtattctcatttagacgcatctcgctctgtagcttattggaaaagatctcagagaatttctctactatgacggtgtccagtagtgcgtatttatctgtaaaatgtgcatagaaggttgcacggtttatggtggctacggtagtaatatccttgactgtaatggagtcaaagccttttttagtaatcaatgaaataaaagcattgataataagatcacgggttcttttcactctaggattatttatatttactgacatattattacctcatttaaaataattttagtttaactcatattgtaaataaagtgttttataagcaacactttatgaattttgttggttgaaaaatatataagctaattttataatcattataagcaacacgagttgtttttgcaatatatgttgctattataattgtttgcaataaatatttattactaggaggtaaatatgtcaactataaatccgaactgtaaatgtataaataaaagctgtaaaaatcatggtaattgtaaagcctgtcgagagtttcacaaatcacaatcatatcttaatgaaacatattgtcaggctggtgcagttaaattcataactaaaggattaatatctaagttaaagttacattcttagaacacaacctagcaattaaaattaggacttactataaaataaaaatggtaggagtgttgaaatatgaatttagataatccgattttcaagaagtcaattacagaagttattaaagcaagaacatctatgagatcatataacggagtgcctttggacaaaacaataggcgatagcataatagatgttataaatcaggttaaagcaccttttggcacaaatatacgagttaagctgataaactctaaagattcagatttaaagcttggaacctatggtgttataaaaggaacttctactttcatagtctcatcaatttcaaaatcagataatgcattagttgatttaggatattcattggaaagagcagtattgtatgcaactgatttaaatttggggacatgttggttaggtggtacctttaataaaggtcaatttgcagatgttatggagcttaaagataatgaaatccttccaatagttatacctgtagggtatcctagtgaatcaagaagaggcatggatactttcgttaggtttatggcaggttctaaaaatagaaaagcctggtctaaactattctttgatgtagatttcaatacacctttaaaggaggcggaaagcttagagtattttattctccttcaaatggtaaggcttgcaccttcagcaacaaacaagcaaccttggagaataattaaaagttctaattcatacgatttctatttagaacaaagtaaagactcaaaaagtgatagttataatgatatgcacaaaatagatattggcatagctatgtgtcattttgagttaacttcagcagaattagggttagagggacattgggagaaacttaagctttcttctcaggataataaaaaatatattatttcttgggttagaaaatagggaaggagattacatatatttgtcttaactaaggaaacattaactactcacattagtagatgaattgatggaaacaaaattacttaagatagcagaaattgcaagacaaaatccaaaagaaaaatttacataattataccactatatcaataaagaaatgcttctgaaatgccataagcaattgttaggaaataaagcgacggggatacatgacgtagcaaaacaagaatattctaaagaactagatgtgaatgagaaagttattaaacttggagaatagagcatggggaggtacgcttcatcttcaccaaataacaattagcattttaatataacgtaaagccactgatttcagtggctttcagtgtttctttgataagctctggcagaaggttttaagatttagagttagctgtggtgtgtactttttagcgattaataaatagaaatatttcaatagtgtatgttattaatgatatagagtgagttttgtgttaaattctattaacgaaggtggttacggaaaagactgtgtaactactgtaaagcatggtgcagaagaatttgtaatatctaaagggaatgcaatatatatcattgaggctttaactttagattgtggaactgtaaaaaaataaaaaatttaatatctttttgatttttcagtgatgggaaaaagatactactatataaataaattaaaattattagattgcagttgttttagctactttgtaggagactaaaataactgcaatttttgttttattacaatttagtcacctaaaaatcgtataggctgttataataatgttaaatctataagagaggtgatataacttgaagattttactagttgaagacgataaaactattgcatctggactagaatattccttgaagcaggagggatttgatacaatggtttgttatgatatttcctcagctaagggtgttataaaagataataaatttaatctatgcttatttgacttatcgctgcctgatggaagtggatatgaactatgtaagatagttagagaaaaagatgatatacctgtcatatttctaactgcttgcgatgatgaagttaatgtagtgatgggacttgatatgggtgcagatgattatataacaaagccttttcgtatcagagaacttatttctcgcataaggtctgtaatacgcagatatggtaaggacagcagttcaaaagcaatattagaattaaacaatattcgtattaatactcttgatgcaaaggtatataaaaatgatgaagaaattactttaacagcgcttgaatatcgtctattgctgatctttgcaaataatgcagggcagattttatcaaggaatcaactcttagaaggaatatgggatgtagcaggagattttgtaaatgataacacgctaacggtttacataaaaagaataagagaaaagctggaagatgatccacaaaagcctacaattataaagacagtcaggggtatgggatataaggttggtgattaaaatgataagaaatagagaggttagagtatactttattattgcttttatagtatctactatagcagcagtctgtatttttttcttgaatgttctagcaggaatgatttcttttatagcctttgttatcttgtttgttagtagtttttggtttattaaaagagaatatggagagcttgagaaactctctggttatttgaggcgtatttgcaatggagagtattcactggatattagagataacgaagagggagaactaagcattcttaaaaatgagatttataaggtaactcttatgctttcaaagcaaggggaacttcttaaaaaagagaaaattcagcttgctgatgccatatcggatatatcccatcagctgaagacaccgcttacatctatgagagttatgtcagacttattaagcgataatgacctagaggcggaaaaaagaattgaatttactaataatattgaaatgcagcttgatcgtatgcagtggctgttaacttctttactaaagctatctaaaatagatgctggaacggtgagctttaaaaaagatagagtagctgtatcagaactaattagaaaatcaattgagcctcttctgattcctatagaaattaagaatcaaacactagtgatagaaggcggtagtaatgtaagctttattggagacttatactggactacagaggctttaatcaacataataaaaaattgcatagagcatactggagaagatggaagaatatctatcttatttgatgaaaatcctttgtttacagaaataaagatcttagataacggaagtggaatagaaaaagaagatttaccatatattttcaagcgattttataaggggaaaaatgcaggtgaagatagcgtgggaataggtcttgctatggctaaaaccattgttacaagtcaaaatggagatataaatgtaagcagcagaaaaaatgaggggacatgttttattataaaattttataaggtaacggtataaaggatagatatttatatcaaacaaaatttaaagtttaaaaattcataagtgactaaattgtaataataaagtcactgtaaagtcatctgaactatatatactaaaaccatgataaaaaaacttggaggttttaagatggaaatactaagaatagaacacttatctaaggtatatggcgttggggatactgcggtaaaggcacttaatgatgtatccttttcagtagaaaaaggagaatttgtcgcaattattggaccatcaggttcgggaaaatcaactttgcttcatatgcttggaggggtagatagaccgactagtggtaaggttttagtagataatactgatatttataatttagatgaaacacagctggctatctttaggcgcagacaaatcggacttatatatcaattttataatcttattccagtacttaatgtagaagaaaatattactctcccactactgcttgatggacacaaagtagataaaaagcagtttgatgagataataaaaatacttaacttagagaaaaggctcaatcatttgcctaaccaactttctggtggacaacaacaaagagtgtctataggaagagctcttataaataatccagctataatgcttgctgatgagccaactggaaatctagatagtaagaatagtagtgaaatagttgatttactaaaaatatttaataaaacttttaaccaaacccttataataattactcatgatgagcgtattgcattacaagctgacagaatcatatcaatagaagatggtgaaattaaaaaggatgaggtgattcgctcatgaatataataaataaattgactttaaggaatttaaaattaaataaaaagagaacaattgtaactataataggtgtaattatctctgcggcaatggtaactggtgtggctactctcgtagtttcttttatggatgtaatgcaaagacaaagtatagccaatgaaggggagtggcatgttgtctataaaaatattgataacgttcagctccagtcaataaaaagtgataaaaatacgaagaatgttattttgagtagggatttaggatatgcattgttaaatggaagtaaaaatgttagtaaaccttacttatttatacaggagtacaacaaagaaggttttaggaagtttccagttgaattaagtaagggaaggttcccagaagctgaaaatgaagttgtaatttcagaggacattataaacaatgctaaagttaactacaaaataggagatactctaactgctgatattggtaagagatattcgaaagataacgaaaacaacaatagagttttgacacagaacgattattttcaaaagaataaagatactcttggagaaactttaacaaaggaaaatacaaaaacttataaaattgtaggtataataaagcgtcctaagtttgagcccacatgggctccaggttttacagtacttagttatgtagatgaaaataatgttacttctcaggaaaaagaaaatgcgtttgtaatattaaaaagtattaacagaggactatttgatcatgcaaaagatataggagtacaaaataaaatagaaacagtagagtttaataatagcttacttagatattatggagttgttaaggatgattcactgcacaatatgattcttggtctatcagccataatgattattataataatggttggatctatttcgctcatatacaatgcttttgctatttctgtatcagaacgttcaaggtatttaggcatgctatcaagtgtaggagctactaaaagacaaaagagagattcagtgttttttgaaggagcagttataggagtaataggtattccaattggaattatttgcggatttttaggtatgggccttacgttcctatgtgtaaactctatgattaggggagttttgggaattactgaaaactttagggtagttgtatcgccgttaattgttattgctgcaattgtagtttctgctcttactatactaatatcaacatatattcctgcaaaaagagcttcaagtatatctgctatcgatgctattcgccaaacctcggatataaaattaacaggtaaagagataaaaacttcaaggtttacagaaaaagtgtttggtattgagggaaatataggacttaagaatttaaaaagaaataaaggtagatataaggcaacagtattttctttgactatcagtatgatattgtttttaactgtaaactcttttacttccgatttaaagaaatctgttattctaagtcaagatggaataaactttgatataaatgtattgataacaggtaaaaatgcagaggaaaaaaacaatacagttaaaaaaataagcgctcttgataacataaaagagctcagtcaagtaaatactttcgatgcaagggtatggattaatgaaaactccatggcagactacttgaatggtgatgacaaaagtataatgaaaaatggagcatatccttatagtattaaagtaaatgcattagataacgaagctcttaaaatatatgcaaaagaagttggagtagattttaacttattaaaggatacaaataaaatttctgcaatagttattgatacaattaaatataaagatatgcaaactaaaaaatatgttcaaacaaaggcagtaaaagtaaataagggagaaaagctagatttattttatcatagttttgaaccagaaaaagatgagtcgctaacatcagtagaaatagcagctgctacagataaattacctacaggagttttttctgaaggggtaagtccagaatttaacattatagtatctagagaagtatttgataaaataataggtgttcgtgggaatatagttgaaagcatagatgcaaacttatttataaagagtaatgatcctgtaacacttcagacagatattgaaactattataaatgctggaggggacaataaaatgtctattcaaaatgtatttatgaatagacaaagagaaaatcagatcattgtgcttatgtcagtttttggatatggatttgttgcactaattatagctatctgcgttgcaaatatacttaacacaatatccactagtgttgctcttaggaagagagagtttgccatgttaaaatctgttggaatgacaccaaagagcttcaataaaatgataaactatgaaagtatattctatggcattaaatcacttgcatatggacttccactaagcattggaataatgtatttaattcatagaataatcatgggaaaatttgattttgattttattattccatgggtaagtattttatcagctgtagtttctgtatttataattgtgggtgtagcaatgctttattctagctcaagagtaaaaaaggagaatattatagatgcactcaagagtgaatagtatcaatacaattatttaatatttatgataaaaagttagtatgaagttttatttccgtgctaacttttgtgttttaataggaatatttatacctgatactaagataaaaaaatatgttattaaatataaaaaattaaccgatttagaaaattataaggaatattatccatatacattaataaaaagcaatttcagcccttcggacttcagaagcacccccgggggtatttgtgagggaagaatgactgaaattgttaattttcaataaaaatactaatggaagcaagtataagtgaaaaaagacgcatcaattacaaattataccctaaaacattattgaatatgatattattaaataagaaaattaaggttaaaactgaggtagaacacctaatgtaggaaggatggaaaaagtggttaacaataaattaaaatcagcaataatagatattgttgaaaatcagttaaaagcaaatgatcctaaatgtactagagaaacattaaatagattaatagaattggaatattctgaaaagaaagccaaagagatgatagcatctgttgctgttgaagaaatttatgatgttatgaaaaatcaagctccatttgatgaagagaaatatagtaaaaagttatcataaattattcgattttgtagaaaaaaacaaatatgaaaatagtttagaggatgaaaaaattcaattacccataaaaaatgatcctaagattggaagaaaagattcatgtccttgtggaagtgggaagaaatataaaaagtgttgcggcaaaaacatatagtagaggagtttgagaatattgaaatgggaaatacattgtaagcaagatgaacgaatttataatgtaataaaagatataccagaagatgattagataaaagtgctggaagagtgggaaaatacctaaatgctaaattaaaatttccttttgaatcaatagttatagaaagtgattatgattcaataattaaagttggtgataggttaaaagttcttggtattggtatgatagatgatttgcatggaataatagttgatgtaaagaaaggaagaagaaaatattgtatagaattatgcttattagaagctgaggggaaagaaaaagaaatagtagatgactatagtgtatggttttgtaatagataaatattgattataataaagagcatttaaataaaagtgtattttaaataaaaaatagataggagaaatttaatagatgagaactgaagcaaagttggaagaatggagagctttatatgatattgctataaagcttaaggagttgagaccttgggagacactatgggatatggatttaataactataattgagtcaaataaaaaagagccatgtgtatgcagtgttatgggaaaaggtggagaatgttatggtattgctgcttattatggattagattctataaagggattttttgaaatggcttatagtagtgagatgcctagtaatcagttaataagatatcaaaataatgttatgtgtaattatggtaatagagatgaattgacaacaaaagaacgtgacattataaagaaattagatttgaagtttagaggaaaaaataattggatatattttagaacttttgaaagtggttatgtaccgtatatgcctgatagagatgaagtattagaatttaccaaaatattaaaacatgtgtatatggctatcgattcactaaataaaggcatggaaattgattttaaaaatggtaagacattaatgcgtaaatttgatgaggaaaacaatatatgggtaaattcagaagaagcagtgattattccagagatggattatcctgttcctattttggaagatgaattattaatgaatcgcttaaagaagcaaaaacaagatgattctattttagaactagatatagcatatttaaattctgcaatagacgataagcaatatgataaaccacttatacctatattatgtatgttagtagatgcaagaaaaggagtggtattatcacaaaacatggtaacacctggagatgatgttgttaatctaatatttgaaacagtagtgaattatattattcaaagaggaagacctaaaaatatagtagttagagatgcttatatggcaagcatattaattgacttgtgtgaacaaactgacatagaagttatagaatcattgaaattacatacaattgatgaatttgttgaatctttttatcagtttagattttaaaatagaaaaaatgtaattataaaaatattagtattggaagaaaagatccatgtcattgaggaagtagaaagaaatataaaagatgatgcggaaagtaaattatgttatgtttaatggttcttctaaatgggatataatattaatatataaatggttttgttaaaggagatgtattatggcgatatatttaaatacgaaaagttctttagaaaattttattgaattgtataaggaaaaatattatgtagacaaatcagagataatatcattattaaatgaaaaaatatctagtaaaagtaaatatatatgcataacaagaccaagaagatttggaaaaactagtgttattaacatgctaggagcttattatacaaaaggaattaatagtaaagaaatttttgataaacttgaaataagtaatagtgaaagctatttacagaatttaaataaatataatgtcataagcatatcttttaataagttatcagatagaggaaatacgtatagtgattatatggaaatgataaaaacgtcacttataaatgatataatagagcaatatggcaaaattgaaccagaaaaatattttacaataagtgatatgctagaggctacaaatgacaaattcatatttattattgatgaatgggattatatatttaataataatttatttaaagagcatcaaaatgatttcttagagtttttaagaaatttgttaaaggatcgatcatatgttgcacttgcttatatgactggagtacttccaataaagaaacattcaagcacttcagctttaaatatgtttgatgaatatacaatgttaaatgatatggtttatggaaaatattttggttttacagaggaagaagtaaaggaattatgtgaaaagcaaagtaagatttcttttgaagaaataagtgaatggtataatggatatataaatgaagatggagatagaatatacaatccacgttctgtagttaaagcacttcaaaatgggaaatgtataagctattggactaatacaggggctatggatgaagttaaggaatatttaaagtataatactatggatgtaagggaagatgtaataaaaatggtatcaggttatgatgttgatatcataataaatgaagaatttagggcaggtcaagaagcacctaaaactaaaacagaaatatattcagctatgataattctaggatttttatcttattacgatggatatttgaaaatacctaataaagaattaatgagagaatttgagaaagctcttcaagatgaatcttttggttatgtatctgaaattattaaaaattctagaaacatgttaaaggcaacagtatcacaagatactgaaaaagtagcagaaatattacatgatattcacaattcagaaatacctatattacaatataatgacgaaaatagcttgtcatgtgtagtaactttagcatatttaagtgcaagggatacatatagggttgaaagagaagagaaaacaggaaaaggttttgctgattttacttttcattcaagaagaaaggctgatactccatttattcttgaacttaagaaagatgatactgtagattcagcaattaatcaaatgaaggaaaaagagtattttcaaaaatttataaaagagcatgaaaatgtactactagtagctatatgttacgattcaaaaataaaaaatcatacttgtaagatagaaagtgtgtattttagtgaagtatagtggatttcaaagtcccccaccctcgcctcaaccatgaaacccacgaccatttgtatgtggcttgaatagcttcttacaggtggtcgtgggttttattgttacgaggtagcattacaataaaaaacacaaaaatataatttataattcacacaaaatttttgacattctcggttacaataattaataccactttactatttgaaatattacattgttaatggagatattcttcccttaagattatctgtataggctagttttccatcaacagttattacaacagcacccatacccttaattctattaactctatgaataattgaagcagcatctaatccaaacaattttgtagtatatatatcgcagtctatggatttatcggcaataatagttaaagaagctatattactttctattgggtagcctgttttgctgtcaaatatatggtggtatttacgtccatccttttcaaacattctctcatatattcctgaggttacaacggattgatcttttattttgacaagtgccacagcatttcctcttggtagaaatggattttgtattcccacattccagtcaccaccgtttgatggtgagtctccaaaaacgagaacattaccgcccatatctaccatagctgaaacagcgccatttttcttaaagaattccatgactttatcagcaaaatagcctttagctatggctccaaggtctatttcaattcctttttttaagaaatatacggtctttttttcatcatctagttgtatattttcaggctttaaaagttcaagtacctttgctatagcttctttctctggtacatgtgcctccttaaaacctattctccataattttattaatggtcctattgcgatatttaaatatgtatcctcacataggctatgtttttttcctatttttatcagctcatacagctctgcatccacttcttgaggagccaatgaagctgttttttttagcatggcaagctgtgatttatcactgttagcactaaagacttcttcataattaatcagcatatcacaagctttttctgcaagcttttcagcagattctccctttatatatagtgagatttttgttcccataagatatattatcttcgtatactcattcatcttgccctcctatatttacggcattatcaaataaataacaagtcctcttgccagcctattttccataaggatgtgtcaacaaaatgtcctaataggcccgctatgaggccgttttgtttcctggcctgatgaaaaatagccattgcaattttggacttgttatttattatcatgtgcctaaattattttgcccatgacttagaaatgcatctataaggtctttatcaatatcagttagttttttttcactgtgatatgccataaaataatctaaattcaattcatcaattggaatttgatatatgttgtattcagatggacactcttttacatatatgctttctggtataaaggtcagtcctaaattactcgttgcaagattacgtacagtgttgatttcggtgctttccattatgatttttggttccaccttataaacgcttagtaactgatctatctgctttcttatagcagaacccttggaagtcagtatcagcttttgagacaatatcttggttatgtcgatagttccttctggaataatggcgacatctttctgatatagatcacagcagcgaggaataatagcacggtatccgtgtctgccccaagtaatagagtttaagttcggagaaatatttcttgaattttgtccaagccaaaaatccaattcaccattcagaatgagtttctcatttttttctggtaaagcctctgaaagctctattcgacagtttggatgtatatccaaaaactttggtaaaaaaagaggtaaaaggtaggttccaaggctaggaagtactcctatctttataaccttgttatctatatctgacacagctgatatttccctaatgagtcttgcgtaattattttctattgaagttaaatactgataatatatcttaccttgctcggttaatcgatatggaagcgtgctgcgacttataagctcacaatttaactgattttctatccttttaatactctgtgtcaagtgaggttgagaaatataaagtgatttggcagccttgccataattactgtattttaaaatggcatcaatataatacagaatatcctgagaatagtattttgacatttaattcacccttttgcgaaataattaggcacatgaaaataaataacgagtcccaaatagcattgcaaatggacttgttatttatctgatagtgccttaactcattgattcttgtgttcgattataacaaatatgttatcaaacttcaacaaataactattagatataataaaattaacatgttaaaattatatcaaagaattactaaaattatgaagttttgaagtacagaaaggggattactatgaagtatttagcaattgtaggcactaactcagatgtgtcaactaatcgtatgctgcttcaatttatgcaaaagcatttttcgagtgaggcagagatagaactatatgaaattaaggatttacctgcctttaatgaaccagaggattctgatgttcctgaaaaggtagcagaattatctgataaaattttaaaagcaaatggtgtaataatagcaactccagagtatgatcatgccatacctgcagttttaaagagtgctcttgaatggattagttacactagtcaggcacttacagacaagcctgttttaatagttggggcttctcttggtacacttggttcttctcgtgcacaggcacatcttagacaaatacttgattcacctgagcttgcggcaagaataatgccaagcagtgaattccttttaggaaaatcgcaaggtgcatttgatagcgcaggaaatcttatctatgcagataagctagtagagcttgatgaaattttcagagagtttcttctatttacagatattacatcaaaacttttagcagaaaaagttttacataaaaaagttaaaaaattcacttgggaagagtaggaggattaataacaatgaaatttacagcaattgttggaactagtgcaaaaagatcatataatcgtaaactccttcagtttatgaaaaaatattttgagtcaaaggcagaaatagaaatacttgagattaaagatgttcctatgtttaatcaatctgataatcagtcttcaagtgaagtgatacagatgttcaataataaaattactgaaagtgatggtgtcattatagctactcctgagtataatcactcaataccatctagtcttaaaagcttaattgaatggctaagctttgatcttcatccacttgctggcaaaccagtaatgatccttggagcttcacttgatgtccaaggttcttcacgtgcacaattgcatcttcgtcaaatcctagatgcaccaggcgttgatgcaaatgtaatgccaggatatgagtttttacttggaagcgcacacaaagcatttgatgaagaaggtaatctaaacaatgaaagaactatagacttcctagagatatgcttcttacgttttatgcgttttgcaaagatttcaaatcagcttaatgaagaagaagagtttacatttaacccaggagtatatgaggtagatgcaataggtcatagtggaagtcttccaatgaaagtatcctttagtgagaaaagaatagaaagtatagatataaatacagagggtgagacagaaggacttgcagatgtagtttttgtaagaataccagataaaataattgaaggacaaacattaaatgttgatgctctttctggtgcttcagaaactagtaatgctgtactagacggtgtagcaaaagcagttaagcttgcaggagttaaccctgacatacttaagagacgtccaaagcctgctagcagtcttataaaagaagacgaagaatatacttgtgatgtagtagttgtaggcggaggcggcgctggattaagtgcagctgcaacagcactgcaaaatggtaaaagtgctattgttcttgaaaaatacccagcagtaggtggaaatacaatacgttcaggtggtcctatcaatgctgcagatccagagtggcagatgcagtttgaagaaaataaaggagaaagacatacaattgaagaactcctagatacagatgagagcttaattcatccagaatacatagatgatttccgtgcacttagagaagaattttctgcttataaggaaaagtttggcacacaaaagggacatctatttgactctccattgcttcacagaatgcaaacatattttggtggtaaaagaactgaccttaatggtaacacaatatacggccaatatgatctagtaaagatacttacagacagagctttagaaagtgttaaatggctagaagatataggggttgagtatgataagagcatagtatttgctccagttggtgcactttggcgtcgtggtcataagcctacaaaaagccatggctcatcatttatacttgcactaacaaaatatgtacaagataactcaggaaaaatcattactgatagccctgtaaaagaatttatcatagaagatggtgaaataaaaggagttatagcaactggtgtcaatggccaaaagataactgttcatgcaaaagcagtagtccttgcaagtggtggttttggtgcgaacacaaagatgctgaaagaatacaacacttactggagtgaaatagctgatgatataaaaactaccaattcatatgctatgactggtgatggaatattacttggtaaatctgtaggtgcagcacttacaggaatgggctttactcaaatgatgcctgtagctgatcctgaaactggtgaattattcagtggagttcaagtacctcctgaaaactttgtaatggtaaataaagaaggaaaaagatttatcaatgaattctctggaagagatgttttaacaaaagctgcaattgaacaaggtggtttattctatcttatagctgatgatgaaataaagaaaacagcagctaatacaagtcaagaaaagttagaccgtcaggtagaagctggtactttatttagagcagataccctagaagagctagcagtaaaagttggaatggatcctgcagttcttgtagacacaattaataaatataattcatatgtagatgcaggttttgatcctgaattccataaggatacatttagcttaaaagtagagaaagcaccgttttatgctactccaagaaagcccgcagttcatcatacaatgggtgggcttaagatagacactaaagctcatgtattagatgaaaatgataaaccaattaaaaatctttatgctgctggagaagttgctggaggtatccatgcaggtaaccgtcttggcggtaatgcattaactgatatatttaccttcggaagaattgctggtaaaactgcagttgatgaaatgaaatagttaatctccatcaaataatctatcatctagtatgataaaattctaaataccaagatttgaaatttttagccttcgacatttctgataggaatgttgagggcttaaattttttgtattcaacgcctagtacccccgggggtagttacacaaactggaagtttctgtttttataatgatggagtaagtgaagatgcattaattcaaaaagagcagtaaattgaaacctaaacatggataaatactattatagtatatatttatgattagattcattttattataggacctattgctttcagccttcattagctatgtgttgtaataacaagccaagctatagctaaatctactgtacttacagaggtatttaaatcaggatgtatgaaacagtatattctaaaccatattgcaatatatattctaaagaatatgtgcctaaaatgcgcgctgagaatgattttagatagtaaatctgaaatagcattgctaatagatttatttgaacattatttagttagaacattaatgaatgtaaaatttcctagagggaaaacgtattaattctgataatatgtttaaaaaaatttagaggtttatagtagtaattcatttgaataaagagaaagtttaaaataagttattatagtcgtttgttagtaatcttttaaattgacattcaaaatttagcgtgttataattttaatagttagctggctaactattaaaaaggagattatttatggataactttacttttattgatcgtcctgataatcagcgtttacagttgatgaaagctgtttattcagaattaaattcagatattgtcaaattattcattgattttcaatggacatatcgtaatatgcaaaaacaatatgattatgctcttgataagaacgatttaagtgaatcaagatttattattttgatgtttctatatcaggctccaaaccaaacattgttgccttcagttatttcggagaaattgggagccactcgtgcaacagttagcaaattattaaaagcaatggagatgaagggttggattataaaaagtacatccactacagataaacgttcattatccgtccaacttactgaaacaggaaatcatgttttagagaaatttttaccagaaaactttagcatcgttaacaatttgctggggagtctgtctagtgaagaaattcagcaactctcaaatttattaaaaaaaattaatgacagcactcaaaaatatacccaagaaaaggagaaataaaagatgcaaacaaaaaaaatcgaattattagaaacattccttagcttatatataaatcattttactgtgttagagaacattggaaaggaagattcgccatatgtcatattagacgttcgtaatgctccggcacaggtaaaaaaagaccaaataaaaggtgctattgcaatgccagcaaaagaattaggaaaccatttagatgaattagataaaagcaaaacgtatgttgtatatgattggactgctggtaccacgcttggaaaaacagcattacttattttattatcagaaggttttgaagcttatgagcttgcaggagcacttgagggttggaaaggaatgaaccttcctattgaagcattagaataagaatgaagaattttaatttatttaaaaagagcaattaacaaaagttagctgctctttttttagttatttgtatgaaggtgaaccacttgggcctgcctagtacccccccgggggtcgttacagaaactggaagtttctgttttatggctacagctgtatatacatcaaagcaagcatttattgcagctaaggcagggacaagattacagcaccatacgtaaatagagtagataatatgggggcagatggtgtacaagtttcaaaagatattcatgatatgcttaaaattaataacttaaatgctgatgtattagcagcaagttttaaaaattcacaacaagtcctaaatttatgtaaacatgagattggatctgttacagcggcacctgatgtaatagatgggttaattaaaaatgatgcaacaattagtgcagtagacgtatttactaaagatttctatagtttagttggtgaaggaaatacaatggaaaatttatagttaatttcttaaaaaattaataaataactaagacttggctatttcaaaataggaatttaattttaattttgaaatagcctttggtattttattagattaaatagaaagtactagtgagttattgacttaaatttaatttatatataaaatcaaatttgtgcttaagaattagcttgattttatatacagaggagatagaattatttgaagaaaaagaatgattataataaacaaataaaaaatggagaagaaaatacaggtaaatgcattgagatgaaaaagtgcaatgaagaggaaatagaaaataataaatgcaaaaactgtggagaacaagcaagttattttagtgatgaaaataatggttggctatgtgaggattgcaggagcatagaagatgggttagataaacttgctgataaaatagagaaaaagctaagtaaaagagtttattcttttgatttaaatgaattaataaattgtttatctaaagatgaaatatataatatagcaagaaatcttggagtaaataagatatcaggtttaaataaagaaaaattaattgaaacattacttaaagaatataagaatttggttgaaaaaagagctttattctttgacgaagaaagatataagattttaaaaagttatgtggatagcaaaggtgtaaaactttttgatgatattgatgaagaggaagcagataagagcgtatattttatacagcaaggaatgctctttccaattgcaaaagatggggtatcaatatttttaatgcctgaaatagtacaaggattaatcaaagaaagaaataatcttgaatatagacgtaaaataaaattcaatagtgaaattataaatatctttagggcaatgaataaagtatatggtattttaaaactagaagatgctaaagagataatagaaagatattttaatatagaaaattgtgaatttgaagagttaattagggaggcaacatattactacaatgaatatagagaagaaggaatatttattgttaataatgaaatagataattttgaggaactattaaaggatatagatacagaaaaagatttgagttatgccatgatttcgaaagaagaattattaaatatgttagaagaaaattgggtttataatagtaaagcaggaaaaactttttataaagagtttactaatatgtttagagtagatagagacatgctaatagctatgatggaagacttgatttttgatgttcaagaaaatgaacctaaagatgcagtagataaaatgatagaattaattaatattgaaaatgacgaagccagatatgttgcatctagtatgatgaataaatttgttaagaaaattaggttatggagatataagggttcaaccactaatgagattaaatcaaatgtagttagcttaaaggcaaataaggatataaaaagaaatgatccttgtccatgtggtagtttaaaaaaatataaaaagtgttgtggtaaagatgagaaggttattaatttattggaataattattagattactttaattaaggaaacagaaataaaataacaagtaaagtataaaaaatatacaagtataattattagttattttttgacggttccttgttaattttcaagatattattcattataattgctccttttattttattgtgataaaattatcgcgtacctttataataatttaatacaaatattttcacgagtataattattttaatacatagtatcttaaaagataccagggagtgtaagcatggaagaaaacttaagcttagaaaatttaaattcagaagaaatatgggaaaagttatataacaaagaattaaattgtaagaagaacattttagaatatattgatattgctaagatactaaaaaagggtgaagctgacccagaaaagattcaagatacttataattttatctatgataatattgagaagatgtcagataaagttaaaccgaatactattatgtatcttcaaaatgaattaaaaaatcagtttggcaaatatgtagttgaaaaggagcctaaagaagaagatgcctttataaaattctttaaggaggcataccctgtaaaagatagaagaaaagattttacttgggttatgatgaatatcaataacatagtagaagaacaaatttggactacattaattcacattaacagagaatatatatgtaaaagaattaaattagaagctgaagaaaaagaagctataattaaaatgatagaaaaggtaattaaaaaagataatataaaatatattaatcaaataaaaagtttagataaagtattaaataatttaaatattaaaatagtaaatgacaaggataaattcaaggttaaaaaattataattatgtaaaaagaattttagtaatgcacaagagcattgttaaaattcttttttattgataaagatttttaaagctgtagtgatattttttatgtgacagctcactttttatagacaaggtataagattagtgaaaatgggctattgctgagccttatttttttaggcagttcttttactggatctacatgaattaccatgcagatattcaaatcattagaaatttcattttcagctgcatcaattgtttccttcgttatgggcattgcccctatattagaattattccatgttttatagattactggaggatttaggcattgttatgataataaaataatcatttgtatctttaaatgtaaataatattgacaaaattctgtgagaataatatactatgaaataagaacgacgacgttcgacaaacatactttaaaaagtatatttttcggatgtcgtttttttatacaaaaaataggacattatgattagttgagaaaaagaattcaaaaattaatttttaggtaatgcgcagtaacttttaagctaaggcacattcaaaaattaaaaaaacttatacataaatagctgaaattttgttttgagatttaacatactaaggaggattttatatggaaattaatttaggcgattgcagttttatattaatctgttcagcacttgtacttttaatgacaccaggacttgcatttttttatggtggaatggttcgtaggaaaaatgttttaaatacattgatgtcttcattctttgtttgtggattagcatcaataatgtgggttttagtaggttattcattgtcttttggtaatgactttcatgggataataggcggacttaatttcttaggttttaatggggtgggagcagagccttcagcatatgcacctacaatacctcaagagctttttgctgcatttcaaatgatgtttgcaataattactccagcgcttataactggagctttagtagaaagaatgaagttttccgcattgttcatatttgtagctatatggtcacttttagtatattatccaatggcacatatggtatggggagctggtggattaataagttctttaggtgccgttgattttgctggaggaaatgtagttcatataagctcaggtatttcaggccttgtagcttgtattatgttaggtaagagacgtggacatggaattatagcatatagaccacataatattccatttgtagttcttggagtagcattactttggtttggatggtttggatttaatgcaggtagtgcactcggagctggtccacttgctgtacatgcattcatgacaacaaatactgcagcagcagcagctatgctttcatggatgttaattgaaaaagtaaaacatggtaagccaacattacttggagcatcaacaggagcagtattagggttagttgcaattacaccaggagcaggttttgttccactttggtcatcaattataattggtatagcagtatctccaatttgtttcttctttgtggaaaaagtaaaaactaagtttggatatgatgatgcacttgatgcttttggatgtcatggaatcggtggaatttggggtggtattgcaactggaatttttggacaaactgcaattaatcctgtagcacaatggaatggtcttttctatggagatgttaaacttttcattgcacaaataatgagtattgtaataacaataatatttgcaggtgggatgactttcttaattataaaagttatgaaaatgtttatggatattagagttgatagctcagaagaagctgatggacttgatgtagctgaacatggggaatctgcttatccatcatttaatggattagactaggaatataatgcatgaatgcataaaatggagaaagtataatattaaagaatagaattaaaaaaattctatggtggatttcaaaggtcgtgtttagctttcaccatgaaccacaaccatttgtatgtggcttaaatagctgcttacagatggttatttttttatttaaaagtcttaatataaagaatattgacgtctgaaaatatttgatgtagtataaaattatactaagttcaaaaatatactgagtataaaaatgggagagattttgatgataaatagaagagaacgtaaaaaagaattaactaaggaaataataattgatagtgcattagctctttttgaagaaaagggttttcaagaaacctatatggaggaaatagcaacgaaatcggatatttctaaggggacgttatataattatttccaagataaagagtcaatattatcagcttattttcaggcacttataaataatcatgataataattttaatgaagttagtgaaagattcaaagaaacaagagatataaaagaaacattgaataagatattagatttcataaatcatatatttagagaaaatattcaatatacagcaatttattttagatacagactccaaacactttttaacgctaatcccatagataatcctaatagaagtggattggaaaatttgatttcagaagttataaaaaatgcacaagaaaataaccagcttagaaatgacatttcttcaataataatggcaagaaattttcaattcatgtacatgaattattttatttcaagtatttatggaaatgataatatcgatttagaattatcaaagagccaaattatagaattatttttaaatggagcaaagcttcaaaaaaattaggggagatgatcactatggtaaataagtatacattgtactttgatgaaatagatagaaaagatttatcacttgtaggagggaagggtgcaaatctgggagagatgactaaggctggttttccagttccttttggattttgtgtaactacagaaagttataaggaatttataaattataataaactttatagttttattgtagaagaaattaaagatgcaaatcttgaaaatattgctaccatagggattaaattaagagaaaaaatagaacaagcagaaatacctagaaaagtagaagaagaaatcattaaagctgctgataagattggaattgataactattatgctgttagatcaagtgctacagcagaagatctagcttttgcctcttttgcaggtcagcaagatacatatcttaatattaaaggaaaagattcgctaattaatgcagtaaaaaactgttgggcttcattatttactgatagagcaatactttacagattacaaaataaaattgaacatgaaaaagtgcatatgtctgtagtagttcaaaaaatggttcttccagatatagctggtattatgtttactgcagatcctgtatcagggcatagaggaattatttctattgatgcaagttttggacttggagaagcgttagtttctggtcttgtatctcctgatatatataaatttaataagaaaaaagagggaataatagataagactatagcagaaaagaaactcgctataatgccaattcaaggtgggggaactaaaaaagttgatattacaggtgaaaaatctactaaccaagtcatggcggattctgatattaaaaggcttgctgaacttggaatgaaaatacaaaagcattatggctgcccacaggatattgagtggtgtttggaaaatggtgaattgtatattgtgcagagtcgtgcaattacatcattatttccacttccaacccctaataacaatgatgataacactcatgtatatatttctataaatcatcttcaagtgatgaccgatccaatatcccctttagggcttgatttatttagagatatgctgccttttggtagaaatattaaaagagaagaaaaatataaaattttagcttcagcaggtggtaggatttatgcagatgtaagtggttttatgaattctgaaaggataaaggaaaagcttttagctttattaacaaatgcagatgctttgatggcagaggctttaggagagcttttaaagagagaagaatttaaggaaaagtttaaaggaaagaaagctaacttaagacccttcttaaaatatatagctccaatagcagttaaagttatgaaaaaccttcttttcactaacctaactggaacggtggagtttatgaataattatattaagcagcgtgaagaagatacattgaaggctattttaaattcaaagaaaggtactgaaaagttaaatataatacatgaaaaagcaagtctttatgaggatgctaaaataatagtaccatatttagctccaggaattattgcttttaagcttcttgaaaagctggaaatgaagcttttaggaacaaataattatagtaatataattgcaaaaggtttagaaggaaatattacaacagaaatgggattacttactggagatttggcggatatggtgagaaaatctcaaagtttaattgatgaatttgaaaatgaagattatgaaactttggtttcaagaataaatgaaattaaaggtaatgaggaatttaagagcttttttaatgattttataaatatgtacggagtgcgtgcttcaggagaaatagatatagctagagatagatggattgaaaatcctgagccacttgtaaaatcaatacttgcaactattaaaacttcagaggaaggcgctcatagggaagaatacaaaaatactataaaaaaagcaaaaatagcaacagaaaatatgctagaagaaatacaaagaaagcacagcaaaattaaagcgaaaattgtaaaaaggcttatatttgttttaagaaattcttttccaataagagaacatcacaaatttatgatgatgagactttgtatgatttttaagaaggaattgctaaaagaagcagaagatttggttgttaaaggttatttaaatgaagaaaaggatgttttttatgtaacgttcagtgaattatatagagcaattgaaaataatgaaagtcttaaaacaatagtagaaaaaagaaaagaagaatatgaacattataaaaagttaaatgctcctcgtgttattacaagtgaaggagaagaaataaaaggtggatataagataggtgatcttccaaaaggagcacttccaggtattcctgtttcctcaggagttattgaaggagttgcaaaggtaataactgatccttcaaaggcatccttgaacaagggggaaattcttgtagcgccatttacggatccaggatggacaccgcttttcataaatgcagctggattagttatggaagttggagggcttttaactcatggaactgtagtagctagagaatacggaataccagcagttgtaggaatatcagaagctacccaaaagattaaaacaggtcaaaaaatcagagtagacgggaatagcggctatgtaatagttctagaagaataggcggtgttttctatgataggctttatagatgtgcttttaagtatgtttgctatgggaatgatgcagttggtacttgccactgcactcccttatatatataactggtggcctaatcctatacattttgcaaaagatgaaacaatctataaattaatcaatataagaatttaagcaaaaatcttgaatactaccatttgcgtaatctttcattgctaactatatttttagcaattttatgagctgtctttccaatttcatctgcattcatggaaataagatttccatcttttgatactaactttccgttaacaatagtcattttggtaaagcttgaatttccaaggcatactaatgaaacaagtggatcatggcatcctgcatactcaaccttattaagatcaaatagtattatatcagcagcctttccaacatcaagtcttccagtatcaggccttcctaaaacatctgcaccacctctagttgcaatcttcagtatttcatatgcattgagtccgtcagctccatactttaaatgatttagaaggtatgcacgtctaacttcttcccacatgttcgaaccatcgttacttgcacttccgtcaactgctatacttatatgtccaccttttttaaaaatttcagaagttctacagataccactattaagtttcatatttgatgaaggacaatgggcaataccagttccgttcaatctatctatttctgaatcgctaaagtgtattccatgtgcataccaaacatcaggaccaagccattcaagttcttccataagctcaaagggtcttcttccatatttttcgatacaaaatctttcttcatcaatagtttctgcaagatgagtatgaagcataactcctctttttctggctaacttcttagtttcaagcattaattctttggtaactgaaaatggtgagcatggtgcaagagccattcttgtcattgcaaaatcacttgtatcatggtatttgcttataagtctatcgctatcctctaatattttactttcagcttgaacaactgacattggagggagtccaccatgatctctacctaaagacatagaacctcttgtagcagtaaagcgaattccaatttcttgtgctgctcttatttgttcatcaattaatgtgtcaggctggttctttggaaatacgtagtgatggtctgaagttaaggtacatccagttcttaaaagttcactaaaacctactagtgccccataatatacagcatctggagttatatttttccaaaattcataaagcccaataagccatgggaaaagtggcttttcttgaacttcttttattcccctaaatagcgtttgatacaagtggtggtgagtatttacaaaccctggcaaagccacaagtccagtacaatcaataatttctgtttcagtaggtacttcaaggcaagtagctattgaagtaattttaggcccttcaattaatatgtctacattttcaaatacctcttctctgtcattgaatgttatggcatgtctaatgttctttaaaattaatttcttcatcataaaatcctccttaaaataaaaaaccactttgaaatgagtaatttcaaagtggttaactctacacgtttttgcgcaaatataaaattatattttccttggtattataatatcaattattttgatatttgtatagttttatttataatttttgtaataaatttcatctttcatatgctaatattttaataaattaactgtttatcaatacggtcatttaataggctcataatgtctaggataaggttatttaaatttccattaatttgtgttatagtattaaagcagtaaatttcacctaaatcttctattttatcagtatactttccagtaattttatgtcttatgtagtcagtttgtttgctggaaattaatctaaggctaaatctcgtttgcctaaaattgactacaaattttactatatgaggaatattaagatgagaaaaataagtactaaaattataataactattatatcttgctgcattgtgctatcttccattttaggagtaatttcaataacggtaggaaaaagatttattaataatgatgctatggataagcttttatatatgtcacaaagtataggtggaaatttagatagaaaatttgaattaccagtaaataaagttgattctttgtattataacgtaatgagcacatttgatattcagcaattaaaagcagatccgcaatatatagaaaaatacaaaggtgtgttagcatcaaccataaaaaattattcagatggttctaaagattatttatcaatgtatttcatattgaatccggatttaactggtaatttagccgatgtgactctagcagatactaaaggtactggcagtttccaaatacaatcagaattaacaaaagataaatatgattctaagaatgaaaatatgcagtggtattatgaaaccatgaagcaaaaggatggaaattggtctattccacatgctgcatcaacaattgatttagaagtaattacatattcaaaacccgtatttaaagataacatacttataggtgtagttggtgtagatttaaaatttagtgatattaaagatttgataaatggaattaaagtatataatacaggatatgctgcattatataatgataactttgattatttagtacatcctgattttacatataaagacaatctagctacagttaaagacagtgtttacaaagatatctatgaccaaataaaatgtagataaaaataaagaaaaggcgataatttctattgaaaagatatctgttgtatcagaagaatcagcaggtgcaacggaagaagtagcagccatagctaaagaacaaactaattctatgaattctatttcagaaacatctcaaaaacttaatgaactagctggcaaaatggatgaaatagttaaattgtttaaattgcattctacattgtaagatttaagatacatgaaagaaaataacaagttaaagatgtaatgagctaaggaaaaattccttagctcatttttgcattaaaattaaagaatttagaagctataccaggtatgcaggcaatgcaaagccactgatttcagtggctttcattgtttttgttaatgtttcaaaaatgttaatctctattgttaaagataaaaaagtgactattacaaatagtaatagtggtgaaaacaaactttagttataaatatatcgcaaaaataattcttcatcataattctaaaaatattgcaagaattttatctgtaattgtgaattgcaacatacacacaatagaatctaagcaggaatttattgataaaggatattttgaagttattaaatgctacagaattttaagagaaaaaactttaacatattattttttcttatatttggtctgaaaaaggtgtgatatttaaataaaatgtactaaaaatacatttatttgacaaaaaatatcaaagaatgcaacttttttaacaaattatattaaagaagtaaaaataccgtacgaatatttaactataaatgagaaagtatgtatatagtggagcataacccactttatataacaatatgctcatatggattaactttgaaatatgccgaactttaatagtgcttgttgaaaaacaataggtattatttagtgttcactaatgaaaacactataaataactataagaaaaggggaaataataaatgaacaaatacttaacaggggtagttgcaatggctgcagtaggaactattgcaacaacatcaattccagcatcagctgaagtagtaaatgattttgaacaggtaaaatcaataataactaatgctatgaatagacttacatctataggtgaaaatacaacaggagctgacataaaagctctttatagtaataagttggaaggctctgtctacaatactaatgtagatatagaatatactacaccaagtgcggcaacaattaagattaatgtaacagcaactacagaaagtgcagttacagtagatgtaacaactccagaagaagtaacaatagaaactttatcttttaataaaccggttacaaccgaaggcttatttacgcttccaactgatgaaacaacaactggaccagcagtaacagtagtacaagtaaaagataaaattaatgatgcctttaaaaaccttaaattatataatgatgctcaagggtatgacgtgtatgaagccgtaaaaggagctatagacggtacaggtttttatggggatatacataatttcacaataactccggcaataaacaataaagatggcttagtgactggaattattgaattaacagataataatcaagcgactatagagaaaataccttttagtataactgtttccaagggaattgatcctagagataatagtgataataattatgatgaaagatatgataaattatatgatgaattcgataatcttaaagatgcgattaacaagttaaaagtatcaaatgatacaactgttgatgatattatagattatacaaataaatcacttaaagataaaagtttagaattaacaataagcaatttttatagaaacccttcagaaggagggcgtcaaggaaacattagttttagtatgaatttagtagaccctagcaataatttaaacttaaataattatgagggtatagatattgatacaccgtcttcagcagaaataaaagaactaataaacaattatttagcaaaattacagccgtcaaacaacatgaatgaaaatgatatattaaacggactaaataaagttatagagggcaaagtatctagtgtaagaataactgatttctacttaatgaaagcaactaatgtagaaacagactattcagatggcaaaggcatctgtaattttcatatagagttaaaagatttaaatgaaaattggttagggatagactactacaatgataaaattgtttatacagaagaaccaggaaacactggatcagaagggggttcaggctcaggaggaggttcaggttcaacaggaaactcaggaaatacaggctcaaatggaaattcaggatcatcaagtggttctagttcttcacatcatagctcaagcagtagttcctctagtagctcttcaagcagcaataccattggttcaactactagtacatctaatactggagcatcaacagtcgctgtatcggattcaactaaaccagtgtcattagcgaatatgtcaaaggaagctgtaaaagcagttgaggcatcagtggtaaataatataagtacagttataggagctactgctgaacaacctaaagaggtagtagcagcagatggaactaagctatctgtaacagctattactaaagatggcaagagcgtaggcgctgttataacagcagaagcaggcagtacaagagctgttattccagttgataaaactcaggcgccagtagcagcagtttataaatacgtgcctctactaggaaaatatatacaagtacaagatgcagtaataacagcagatgcagttacattacctgtacaagctaatgcaacatatgtagcatcaccagtagttatgaatacagcagatacaataaaagaaggctgggtacaagtaagcaacaattggtacatggtaaatggaacaggagatccattaacaggatggcaaaaagatagtgtaggctggacttatatgtcaccatcaaatggagctatgcaaacaggttgggcacaacttggaggtacttggtatcacctaaagaataatggatatatgtcaacaggatgggttaaggatggaagtacttggtactactgtaactcagatggttcaatggcagctaatacagaaattgatggatataaattaggtgcaaatggagcatggataggataatataagagtgaaaattataacttaaaatataaaaaaatattaacgtataataaaactgtctcaaaactatattttgaggcagttttatttatatatataagcctatatatataaattatgctatcttattttttaatgcacattgcatcttcaacatgcattaagcattcaccaaatctttggaagtgaacaacttctctctctcttaaaaatgctagtatttctttaatttgaggttcatcagttaagttcattaaattctcataagttactctagctttttgttcagctgctaaatcttcatgtaaatcagctataggctcgccctttgcttgtatataagttgctgtccatggatttccagttgcatctgtataaaataatgcttttctatgatcagcataatgcccagcaagtcctgctttttttatctcttctatagttgcgttttccataagttgatataccattgtagcaattatttctacatgggccatttcttctgttcctatatctgttaataatccttttgattttccagttggcatagtaaaacgttgatctaaatatctcaaggcagcacttaattctccgtcaggaccaccatattgagttattagcaattttgccatattaagatctttgcatttgttaagattcactggatattctaaattttttacatagtaccacataaactcttattcctcctccctgctacaattttcccaaggccatggtgtatttacccatgcttttggattttctacatatgcagatccaaagtttgttaatgggccaaagtttttttcgtatgcgctaattagttcggttaacttacaagataccttgttgtaatcttctttagcgtttttatcttcaggaaaattgtcgaggaataggtttagttctacagcacaaaactgataaactcttatactatttagcatatctcgttggttcataatattatatcacctctcgtatttgattttcttgtattcaaattcatattcatgatcatattcatgttcgtgctcatgctcatgatggtcatggtcacaatcatagcctttatgatcatgttgttttttatatggtctgtaaaggtctttaaatattgttccttttacaaaaccttctttgcaagaatacaaattttcatatttttgaggtaatatatatgcgcgtgcatattcatatttttttgaatactctttagaatattcttttgaatattcttttgatttacacatacagtcatcatcgtcgcgtctgtacataagggttaacactccttcatttgttgttcatttatataagtatcttatgcgtattatgaaataatgtgataatttataaaatatattttaaattcatgatatttattgtcttaaaatgttatgcaaggagtatggaataaaaataaagacaatggttagaaaaaatctaatcactgccttgttcttgtttcagttaaatatgaccatctttaactgaaacaaagtaattgctatttaaaccgtatttttcgagtatttcaggaattgttttatcatatttcatttcatctatttttttatttattgcttttgctaaagtaatatcatttttcctaacagcagcagctattttaccaggggattcaggagtataatctgttggaggcaatactctcaaatataaattatttcgaaagatcatgtatgaagcaaaaatagaatcggttattgcagcatctatttttttagtacttacagctgataataaatcattttgatttttaaatgaaactatatcttttacgatgccttctgttttccatttttgggctagatttaaaaaagctgttcctagttgtgcacctaccacagcattttttagatcctccttaaagacaatttttgatactttaggggtaattattgcttcagattctttatacaatatatttgtaaataatgcttcttttttccgttcatctgtaatatacattccatcagctactatatctatgctgtcatctgtatttaattgttttagtaaatcgttaaatggaatttgctttatttctaccttgtttatcccaagccttttagcagcttctcttataatttctgcatcgattccagtaaattctttagttttcgaatctatgtaagcaaagggaatatcatttgaagatgcaacaaccagtacccctttttcttttactatttctaatctatcttttgatactttattattagatatattagcgccacaaaatattaattgaataatattcattgataacataataaaaataagcaattttttatgaattttcatatgctaaatttctcctttttattattatcttaacttaatataaaattattcattaaagaaactcaatattaaatcaaaaaaattcctataattaaggtaatattaagaaaaggaatgtataataaaggttggcaaagatttaaataaaaatttatgatatagatacccaactttaaaactaaatttatgtgataaattacctaaatcataattattttgagtccaaaagatatgaaaatatagctgaaggttctaagtagcaggttgtattctctttagcatgcttcaactttcagtgtgacaagttaaaagaaaatatagctgttaaacaataatattaatagccaagccataattagagagttaagtaaccgattatttatcttataatgtattattttgttgaaaaagaggaatttaaagctgattagcgaataataaacaataatagatttggcttatagtcaaacaataaatgtatggggtgaaagtcacgaatgaggtgtctattagaaataagcaataatttctcatcttgggatgattttatatcagctataaatgaaaatccaacagcgagacaaattacattagagtcatggaaaagatgtgagaagttaggaatgaatcctaacaaagttaaatttgagtttttatcaagtagggatgttgaaaaaaagaagaaggaaaattataaattgacagaaatatcaaatttatatatggattcgctctctatgagtttagcaaatattccacatataattgctttatcagataatgatggatggatcattgagtttagagaaaagactgaagaactgggtggaataatagaaggtttttctcttggggtaaattggtcagaagaaaatgttgggaataatgggataggaactgcattggcactggggcagccaattttggtttatggggcagaacactatggtatgcctgattgtaagtgtgggtgtataggggtgccaattataaataatgaaaatatcataggggcaattggaataagtgttccagttgaacatatgaatccggtgaaattacactcttttatagcttgtataaattcaattgagacagctatgaaatatattaatgataaatttagtaatacctcaactggaattaatttaactgcaacaagtgaattaattgcaacagctgttcacgatcttaaaaatccactatctgtagttagaggattaggtcagcttggcatagcaacttcagataaagctaggatggataattattttaatagaataattaatcaagttgacgaaatgaatgatatggtaatggaactcttgagtatatttaaaccagaagagcttacaccacagaaggtaactcctctaataaaagatgttttaaactcttttcagcctatttgcaatcataaaaatataaagttatcattggtagacaatgtagatgaatatgcgaacatatcaaaaaagcttttaaagagggcaatagagaatcttataaacaatgcaattcaagcaatggatattggtggttcaattgaagttacaactgaaaaatataaaaattccatactcattataattaaagatacagctgggggcattccagaggagctcaatgaaactttatttgaaccgttttcttttagaagaagtggaggaacggggcttggcttgtttatggtctatcatacaattacaaatattcataagggaaaaatatggtttgatacagagctgggtaagggaacaacattttttatgaagctgccaataacaagaaatgttgaaaatgtctcagttaggcagttcgagttgatttaattaaattaagttttcatatgtagctatattggattatgtaaaattataattttgtagaagatatttgaataaacttacaaataaagtttaacattttcagaaactaacggtattttgatgtatcatgaaaataataataaaaccatattttcatgtatcgctaaaataaaaagaaagtgaaaggattagatttatgtcaaaagtattaaaattaataaagtactttttaggatttattgcacttacgggtttgatttatacatttatttattattctgtgataagtaaattaactacataattagaaagtatctgtagcagtgcacaatgcacaatgcacaattatggttaaaattattgcaagatttttagaaccatgattgagaattatttttgcaacatatataataatattttttgaatttcattaagttaatgttaaggtagtgtaagtataataaaacttgtaaaaaagtttttttcattttcatttcttaagcaatataaggctatgttttaatataatattgaaatatagccttaaaaattatagacgggattgtccacctataatacttaatatatgaaaattgtacacaaaaaaatcgcaaattcattttcttgaataatacgattttacaatttattatttaattttttgattcatgatttatgaatattgctttttagtgcaaatccatatagttttgtttcttcatcaagtatgaaggatggtataattttgttggtggataatattcatcatgggtgtaaacaaatccaagtttttttagcaattgagcagatgctgaatttttaggattatgtccagtaaaaagtgcattagcattaagatttctaaaagcatattccattactgcaaaacatgcttctttagcaatcccttttccccaatacttctcttttaaatgaattcccatttctaatatattgttctcatgatcatatggccgtaaaccgcagcatcccaaattttcattagtttctattaaataaattggccaatattgaatattgtaattattataattttctatttcatttcttagcctttgttgtacttgttcttttgacatcgtgccttctgctgtgataagttttgttacttctggatttttccataattctaaagcatcacatatatcattttcactccatattgaaaatccaattcttagtgattttaaaaagaattctttcattctatacgctcctataacttcacaataatctactattgtttattaaactatagtttttaataacaattattataacataatttacaaaatatcacacatgtcatacatacattagatctctattttttagtcttttattctgctatatgagtgctctatattgctttgataaagtttttagcctttattatttctttatctcagcgaacgaacgtgagtggaaattatattgatatcagcccaaattgaacatatatttgttccatatgaatatgaaaatttctctgcttgagatattttaaattttcaatggggaacctatatagatatccaatttaagaattcgacttattagatgaacagatttacaaaattgctagaattttaagctcatatctttgctagaaatcataaatatatttgtgaagaaaacatttgaaaatgagctgttaaaggttcttagctgtaggttgttctattttagcttgtcaaactgaaagttggagcatgctaaagtggatacaacctgctgcttagaaccttcagcgatattttcatagcttttcggaacaaaatatttatgatttggtaagtagactagggaatcacttccctaacccctctcagaaccgtacgtgcggatttcccgcatacggctccccacattataattcacagtatatatgatatatcttcttttaagttgaaaatattaacatatattttagctttaggtattttgaagcactcaaacatagtgtcaaaacttctccagttataacttcttttctgacttcttttgtttagccatttaaaagttagttttcttactaaatatctgaaagttgcgagacttaaactgttgtcagtgattccgtaatacctataatatcctattagtctctgtgtcagtttctccattaataatgtgagcggcactgttctattattctttaaccattcattcaatctctttatgctagctccaaatttctttgagctagtcttcctcttaactctaaaacttccattctttctgcaactgcagaagtgtgtaaatcctagaaaatcaaaagttctatctttatatgattctaactttcatgctctcttgaattttctatcatagtaggcattcttaccgaaatataatattttagttttatcttcagctacctgcaagttaaatttgtctaatctgtttttcaatgcttcatagaaagctttcgcttcgtcttcatactgaaaacagcaaacaaaatcatccgcatagcgtactatgtaagcctgtcctttacacttctttttgataaagttattaaaccatatatctaaaacataatgtaaataaatgtttgctaatgttggagatattattcccccttgtggagttccttcatatactttataaaactttccgttttccattattccagttttcaaaaatctacctatatatctaagtaagttcttgtctgcaatcctgtgttcaagaaatttcatcaaccacttgtggtcaacattatcaaagaatcctttgatatcagcatctacaacataattcacattcttttcagataaatatacatttaagattttaagagcatcatgacaacttctattttgtctaaacccaaaagaactatcaatgaaatcttgttcatatattgattttaatattttattaatggctaattgtacaactttgtcttcatatgccggtatacctagaggtcttttcttgtttgaaccagacttatctatgtatactctccttacaggctgcggtctatatttaaaagtcttcattctaattagtagattatcaatattattctctaagttagttccatattcttcctttgttaccttatccactcctgtagccttatttccgctcagttcataatggcataaaattagcatttccttgttaactaaatgcattagtgatgtaaatttctctttaggattatttccagctatttctgctatcctctcaagttttgtgtacattttttttcctcctctgtgtgagaatttctgtttctcttttcaaggtctataatatgttacacccttccctccatggtcattactcatttcttcagtactatggtgtaatccgactactcattatcatttgaatacctctgatttctaatcattgttttccatactctgaagtcagagaataatgagtcctcccaagttgacgtactatatcaatgtataccatgctacaccttaaaaccacgagaaagcacagatattcttgcaataatgattatctatgttctgacttctaatttaccgatattatcgtcctttctgactttgtgataatttcgtggctagtagtttcagcattcgcttgcggcctggtaccttgtttgtctacacttaacttattacatcgccataataagcccaagactaactaatgactggttgctggcctttgtcatgcaggattcccacctgctatatagtaataatgaggaaggttagccctcattatcttttacgcccttgcttggcgtaccggtaagttaccacataaatctagtttcaaatttggatatctataattatttttcaaaaaggtatttacaaataaagttaatagagttaatattaatacatagaatcaaattgatattatctaaatgataaatagtaagtaaaataatttttctaatatatagaggtgggtaagttgaataaagaactagcagataaaaatgaaagagaatttttaaacgaatatgatgtaaatatttatgataggccaagtgttacaaatgacattattatatttacaactggtgataggatagaagagaattcaagaaaagtaccaaagaagggaatgcaaattctcttaattaaaagagatgattatccttataaaggaaaatgggcaattccaggaggtttcgttaaaaatgatgaaagtctggaagatggagcactaaggaaactgaaagaagaaacaggaatagataatgtatatactgagcaattatacacttttggagaagttaatagagatccacggacaagagtaataagtataggaaatatagcattaatatcgaaagaagatattagatttggtgattataaagataggaaagaatcaaagtggttttgggtagaaaaaaatttagttgattctaaaaaagatgagactcataccataaataaatatattctaaaatttgaaagtgaagatgaagaaataaaatttaattatgaaataatagaaaaaatagaaagaactatttttaggaaaaaggaaaatagttataagacgttaaatgaaagtaatgatgaattagcttttgatcattataaaataatagattatgcagtagacagaattagaaataaaatagaatatacgccaattgcactaaatcttttgcctagattatttacagttaaggaacttcaaaatgtatatgaagcaataatgggaagagaaatcttgaattttagaagaaaaatggaagatatgattatagaaactgatgaaaaaatagaggggaaaccttttagacctgctaaagtatttaagtttaatgaaaactgggagcacaatttttaaaccaaatgtaagttattaataaaatttaatgatagagaattgagaatttatatgagaggggataattaaatgatttttttaaatgataaagaaatagaggctaaaaaatttcctaatggagaaagtttaataaacagccaagagttaaatattaaagaatgggcaaataccattaaactcaaatttgaaagtgataatgatataactcatttgatatttttaaaggagcatttggatgaattaaatattaaatgtaaccttataattccgtatatgccttatagcagaatggatagaacagaagggttcactatatttaccctaaagcatttatgcagacttattaattatttgaattttgaagaagtatcaatttatgaaccacattcagatgtatgtgtggcattacttgatagggtcaaagttataaacatgtctgcaatattagcaaaagatttattagaaaaagtagatgataaaaaagattcagtttacttagtttatccagatgcaggtgcagctaagagatacgggaaacaaattgaatatgaaaaaatattaactgcaaacaaagaaagagattttaaaacaggatctataaataagcttgaaataaacggagctgtagaaagtaaaaattttaaagctattattgtagatgatctatgttctaagggtggaacctttattttaacagctaaaaagcttaaagaaatgggtgcaactgagatttatttggtggtaacacattgtgaggatacaatttttgatggagaaattttaaagactgatttaattactaaggtatttacaactaacagcattttatctaaagagcatgagaagattgaaatatcctctattgtataacttaggcttatgcaataacttaccgaaatcataaatattttgattccgaaaagctatgaaaatattgctgaaggttctaagcagcaggttgtatccactttagcatgctccaactttcagtttgacaagcaaaaatggaacaacctacagcaaagaacctttaacagctcattttcaaatgttttctccatattatgacccctgtggttacaaatatatttatgatttctagtgaagatatgagtttaaagttttagcaactttgtaaatatgttcatctaataagcctaattcttaaattgtttatcaataaagttaaaaatgaaagaatataagaatttaagaacttaagaataaaggaatatgggaatataagaatttacatttttaacaatgaaaaaacttaagaatttaaaagtgaaaatatctttaaagaaaaaaatataaaaagttaacaatttgtagtgttttcagtgatttgaacaattatatatattgcaaaaataattcttcaggatagttataaaaatatctcaagaattttagccgtaattgtgaattgtgcattgtgaattgcaatataaaaataatcagattattttttaaattaaattatagagattggggagacgattatgaataaattattagtggttatagattatcaaaaagattttgttgatggagctttaggatttaagaaggcggaaacattagaacaaggtatttatgataaagtaaaaaaatatttagaaaatggtgataaagttttattcacttatgatactcattttgaaaattatctagaaacaagagaaggaaagaatttacctgtacctcattgttatataaatactgaaggtcatgagctttatggaaagttaaaagaatttgtgggcgtagagaatacttttcactataataaaaactcttttggaatagcgccagcggacatgttaaagatatcaaaggatgttggtgaggatatagatgaaatagagttagttggagttgtaacgaacatttgtgtaataagtaatgtagtcacatttcaatctcagtatataaatgcaaacttaagtgtagatggaaccttatgtgcaagttttgatgatagtcttcatgacaaagcattagatgtgattgaagcactaagtgtaaaagttattagataggagagatataaatgatagatccattattattaactgatttttataagacaatacaccatatgtgctatgcaccaggacttacaaagcttgtaagctattggactccaagaatgtctagaaaagaaaacatggataaagtagttatgtttgggcttcaatcttttataaaaaaatatttaatagaatattttgatgaaaattttttcgccattcctaaggatgaaattattagtgaatataagagagtgatatctagaacaatgggaagcatcgcggcagatacagctcacatagaaaaactgcatgatttaggttatttgcctatacaaataaaagcagtccaagaaggaacaagagtaaatataaaaacacctatgattgaaatcactaatactcacgatgaatttgcttggctcgtaaattatttggaaaccttcatgagttgtaatatatggcagcctatgacaagtgcaacaatagcatatagatatagagaaattgttgaaaagtattttgatttaactgttgaaaatggtgatgtaaaaaaagcttgtggtgattttagtatgagaggatttagctcaattgaaagtgcacaggttagcagtgcaggacatttactttcatttactggaaccgcaacaatatcatcaatactttatctagaaaattattataactgtaatattgaaaatgaaatagttggacttggaactccatcaactgagcatagcgtaatgtgcacttacggaactgatgaacttaaggcttacaagagattaattaatgaagtatttccaagtggtgttataagtatagtttcagatacctacgattattggaaccttattactaatatccttccaatattaaaagaggatatattaaatagagatggaaaggtagtaatcagaggagatagtggagatccagtaaaaataatctgtggtgatagtgaagcaccaaaagatagtcctgaatataagggaactgttgaacttttatgggatatatttggcggagaaattaattcaaaaggctataaagttctaaattctcatataggaacaatatatggtgatagtatcacagttgaaaggtgcgaagaaatctgtaagtgcctcgagcaaaaaggatttgcagtaagcaattgcacttttggaattggctcttacacctatcaatataatactcgtgatacctttggatttgctctaaaagcaactcatgcactaataaatggtgaagaaaaattcatatttaaagatcctaaaactgatacaggaaacttcaaaaaatctcaaaaaggaatgtgctatgtatacagggagggagaggacattctttataaggacgagcttactataaaagagcaggaaaactataaagataatttattagaggtagtatataaagatggaaagcttattaaagattattcattaaaagaaattagagataagttacatggagaattttagttaaagataaaatatcttgtttttattgctattaggaaaaataacggaggtgagcttaagtgcatatgggtgtggtgtatttaggaatgaccctaaattaatagcacaatactggcgagaacttctaattaacgaaaattttattagttactttgataatataatatttgctgttttagataactcgaaaaatcaaaactgcataaaagcatttgaaggattagaaaagtaggatatttactgtatttttaagaagggaatgagaattttgtacactattgaagaaattcttgaaatgaaatacccatatgaattatttacaggtgataaagaaatggctaaaaaggaacacattgatcttcttaaaatatttcatccagatttgcatagggattcagagaaatacaaagaagtcacaagtaaaataaatgaattatattctgaaactgttaaattattagagaatggaacctggatggaagaggggttaattaaaataacaagttctgatggcgaaaaatattcaatgaaatataatgtagaatattcgcttgaattaggaaaatattttattggaaatagatcaattttatatttaattgataaaaagcatgaggattttttagaaaatgcattggatagaatcaagaacttaaaatacgagaataacaacatgaaatctgaatttgaaaagtattttccgaaagtgttaaagaaatttgaaaccatagataagaagataggactgcttatagaaaatccagaagatgcttattctcttaaagatatattaaattattatagcagcaaagttccaccaagacatgtaatgtggattctaagcagtttatataatataacttgttttctatattataataatctatcacataatggaataaatattgataattattatatttcaccttcaaatcatattggatttttgttaggtggctggtggtatacagttcctatagatgggaagatgcttggagtacctagcgaaatttatagcatcatgtctccagaaatgaagtcatctaaaataggtacatttctattagatttagaatccataaggctaattggaagaaccttgcttggtgataagaatggaataagttttattgaggattctgatatgcctaagccacttgttgattgggtcagaggagtctcagtaaataattcaatggaagagtataagctttgggaaaatgtgattaaacaaagttatggagagagaaaattcgtaaatatggatattgatataaataaattatatgctggaaaaattaataagtaatatatatgtcgcaaaaataattcttcatcataatttaaaaaatattgcaagaattttagaattataaattgtgaaatgtgaattatgcattgttcattgtgaaatgtgcattgtgaattgtgaactgcaatatatatgagtatttaggaggtattaaaatgggaacaggaagatgggattcaaaagcttgggatagttatgcaagtgcaactataaaaggaaagaaaacagtggatgatgtctttgtagcgaggaaacttgatccaagtttaaatccgtataaagtaagttttagggaaagctgtgacagcagcgacaatccaaattcaacaccaattattattggattagatgtaactggttcaatgggaataattgcagatagcattgcaagggagggcttagaaaaattagctactgaaatatataacagaaagcctgtttctgacccacatatcatgtttatgggaattggcgatgttaaatatgattcagcccctttgcaggtaactcaatttgaagctgatattagaattgcacaagagttaactaaaatttatgtggaacatggaggtggaggaaataactctgaaagttacactttaccttggtggtttgctggaatgcatacaaaatgtgataattttataaaaagaggaaaaaagggatatctatttactataggagatgaggagtgtcctaagactgttcttaaaagtgaaattaaaaaagtctttggagatacaatacaaactgatagcatgtcagcacaagatttattaaggcttgtatctaagcaatatgaagtatttcatattattattgaagaaggaagtcatatgcgttatcagccagatgaagtaataaagtcatggaatgatattttaggccaaagagttttgagattgtcagattatacaaaattgcctgaacttatagtatcaacattacaagtattaactggagaagacaaggataatgtttctgacagttgggacggaagtacaagcttaataataagaaatgctattaaagaattagttccaaatgtaaaagctgatgatggacttgtaaagttttaatgttattggagctgtcgcagaaagaataaaagctacaatatactgtattaaatttaaaaattctaatacagtataattgtggtcaattttcttaagggaacagctccatgtttaatatcatgagaggagagcttggcatgaaatctataaaagtgataataggttctaattttggtgatgaaggaaaaggactaatgacagactacatgtgttctattaatgaaaatccagttgtgattcgattcaattcatctgctcaagcaggtcatactgtagttacaccagatagtaaaagacatgtatttggacattttggagcaggaagcttacaaggtattccaacttttttaagcaattatttttcagtgaatcctttgttatttctaaaagaatatgatgaacttattaaaataggaattattccccatacaatgatacatacaaattgccctgtagttataccacaagacatgatattaaatcagatattagaaagacatagaggaaataataaacatggaagctgcggactagggtataatgagtcgattgtaagaaatagtattgatagatataaaataacctgcggcgacattttcagtggagtttataaagataaacttggaattataaaaaaagaatatatagataagagagttgaacagttaaatttaaagtattccaatgataatttaatgaatatactatttgatgcaaatataatagaacattttatttatgatgttgataataattttaaatcaaagatagagctatctaatatagaaagtattttagaaaattatcaaactcctatattcgaaggcgcacaaggattaatgctatcggaggactataaatattttccttatgtgacccattccaaaacaggtgtaagaaatgtgatagatttgttagaaaaagcgaagctcagtgaacttgacatagaagtaatctatgtaacaaggagctatttaacaagacatggtgctggaccattaccaaatgaaatgaaagagaagccatacaaaaatattacagacttaactaacatacaaaatgaatttcaaggtgttttgagatttgcaccactagatatagatttattatcagagaatatagaaaatgattatagcaagattaactttaagaacaaaaataaaaaaatcaatataagtaaatctattgcaataacatgcctagaccagatagataataataaggcagagtattataaagataataatgttctagtaaagaacactaatgagttcatagaggatatacttaaaaagatgaatcctgataactgttatttaagctatggagcatcaagagataatattgtaaaatattaaaataagatttgaatatcataatttatttaaatatcaaatttgcatacaatcattaatttatttaaaataaatagtatagttgttatagataaccaaactaagacctgaacttatgcgtatgtctaaccgaaatgaataacatacttttgttccagtttctaggtaattctgataggggattccaaggctataaagttgctaaaactttaagtaaatatattcactagaaatcataaatatatttgtggagaaaacatttgaaaatgagctgctaagattcttagttgtagattgttccactttagcttgtgaagtgagagtccaaaattttattttgagttctcgaacttcctcagcgaatgtaatgagtcgagcttccctaggaaagtgggagcatgctaaagtggtgaaatctgcagcttagaatcttcagcgatatttttatagcttttcggaacaaaatatttatgatttcggtaagttaccgcatgaatatagttttaaagttggatatctatatattataggagttatatgttaaatgttaattggaaaccaaataaaatgttatctattccattatatcagcaaatagttaattatattaagacgatgatatcaacaggggaatgggacgtaggtagtaaactgccaacacaaagagagctggcaaaaatatttgaagtaaatagaagtactgttgtggaggctttagatgaattaaaagcagaaggactaattgaaggtaaaagtggtgtgggaactgtaatagttaataatacatggtctctaattacatctatttcaccattaaaatggcaaaattatattcaaagtggtatacaaaagccaaacctgcctacaattcaaaaaataaatcaattagaatttaaagatggaatgatacggttaggaacaggagaactttctcgtgatttatatcctcatgatatgatgaaagtgattttaaacaaagtttcagaaaaggtaaaagatttaggttatgaggaacccaaagggtcattacatttaagagaaacaataagcaagtatctgaaaaagcataatataaatgtttccccatcaaaaatattaattgtatccggatcattgcaagcactgcagctaatttctatgggaattttaaagagtggatctacaatacttgttgaaaagccttcatatttgagttcactcaatttattccaatcatatggaatgaatttaaatagtgtttcgatggataactttggcattaagccaaatgaaattataaaaaataagaaaaatgataattcaactttattatatactataccgactttccaaaatcctactggaattgtaatgacagaagagagaagaaatgaaattttagaaatatgcgcaaaagaaagaattcctattattgaagatgacgcatatagagaactatggttagataaagagccgccactaccgttaaaatcaaaagataaaaatggaaatgtgatgtatttaggcactgcttcaaaatctatagcagcaggccttagagttggttggctagttggaccagaaaatgtaattgaacatttaagtgatcttaaaatgcagatggattatggaacaagttctttgtctcaggaagtcttagctgaattgattgatagtggcttatatgatgaatatttacttcagctaaggaatcagctgaaaattcgaagagatgctacactagatattttaaagaggtattttgatggcatagcaacatggagcaaaccacatggtggattttatatttggttaaaattaaagaaatcattatcattaaataaactatttgaattatcttatgagaaaggaatattgattaatccaggaaatatttatgatttttctaatagtcaaaatttaagaatttcatattcatatgcatcattggaagagttagaaaatgggttaaggatattatcagaattagtaaaaaagagctattttaatgatataagtaaaagcagctattgattttttcaatggctgcttttggttgggtaataaactaatatcttggttggggactttttatattttattagttaaaataagaaaagaactaataaaggaggtaaattatgattaaatacttattacaaggacttctatttggacttgcttatgtggcaccaataggaacacaaaacttatatgtaataaacactgctatgcaagaaagtaaggttgaaacatataaggttgcacttataactatcttatttgatatttcactagcaatttcatgtttttttggaataggggcgcttattcaaaaatactatctattaaaattggcaatacttctatttggatttatagttataatttacataggagctggattaatacgatcatcgtcacaaatattagaagataaaaagcttggtaataattcattaattaaaatagctatttcttgctttgctgttacgtggcttaatccccaggcaataattgatggatctttattattaggtggattcaatgcttcacttccagcagaaatgtcaaagtactttatatttggggtatgcattgcatcagctatatggtttagtagtcttgcaggattcgtaggaaagtttagcagtaaatttaataaaataattagatggatcaacatagtttgtggattaatacttatattctatggtttaaaattagggtactcatttattgaagcgatatatttatagctttttatataatttttgtggatatagataaactaactataatctatacttatgcgtatagctcaccgaaatgaataatatacttttgttccagtttctaggtaattctaaggctataaagttgtacccaaagtgctagcctcaaagaacaagcgctcacagagaaagttctgcttaccaaatgtaaaatttggagcatcactttttgaactagcacatttggaacaacttatagccaaagaatcacatccatcaaaattaccaatgaaacatttcacaaaagtatatcactcatttctagttttgatatatttcatagtgtaaatctagcttatagttggggtatagggctccacaatgatattcaaacttataaaatttcaatatcgctggtattcaggaaattgaaacagtagatatgtattgttatcaatgtggaaccctatatctataaataacttaaaattttgatttatactttgcaataaataccatacaagaaagcagaaacatttttgtgcagcaggcattgaaaatgagctgttaaaagctcttaattgtaggttgttcaactaatgcttgtcacaatgaaattgggagcaagcattagttgtgcaacctgcaatttagtgctttcagcgaaattttcatagtcctgtgaaacaacaatgtttctcctttcggtggggtattgcataagcctaagttatatagtgtttatctatatacaaaaatgtatttgttggatacaatataggtgaaattacttacataatgaggagattcatgatatgaaatattattttgcaccattagaaggtgttactggatatatatatagaaatgcatatgaaactttttttggacaaattgataagtactttatgccattcatatcaccaactaagaataagagctttacttctagagagctaaacgatgtgctgcctgagcataatcaaggaatcaatgttattcctcagatacttactaacaattccgaatatttcactgatactgtaaatcagttgactaaatttggatacgatgaagttaatttaaatttaggctgtccatctggaactgttgttgcaaagtataagggatcaggatttcttgcacaaagaaagctgcttgatgaatttttagaagatatattttcaaatgcatcaactaaaatttccataaagacaagaattggaaaggattcgccagatgaattttatgagttaattgaaatatttaataagtatcctttagaggagattataattcatccaagaattcagacagacttttataaaaataagcctaatatggaagtgtttaaagatgccttagcattaattaaaaatcctgtttgttataatggggatatttttaatgcagaagattatactcaattatcagaaacttatcccaagcttgaaacagtaatgcttggtagaggacttattgcaaatccgggcttgattgaagaaattaagaccaatcgtcttatggataaagaattaatgaaggcatttcatgataaagtctgcataggatatgaagaagttctttcgggtgatagaaatgtcttatttaaaatgaaagaattatggttttatatgatacatatctttactaatagtgataaatatgctaaaaagataagaaagacaaataatttacaggaatataagggaatcatatcaagcatgtttcaggaacttgatataaagaaaacggatatacatggattttaatggttcaattatcatatagatttttaggattaaattatctcatagattgagaaagtttttaatgggctaaatttttgtataaatgaagtttatgcttaactactgtttattatagagaataagcgtgagatagttataattaaattagcatattgctatccaagatacattaaagggaataatatgtattggagaaatagcttttcattataattctaaaaatattgcaagaattttaaccctaattgtgaaatgtgaattgcacattgtgaattgtgaattataagatgtgcattgaaaatatatatttataaaatttggaatataatcactgatatttttataatttattgtatcagggggtgattatatgggtgttaaagaaataattgagaaatacaggggtaaaaatgcagatatgcaaaacattattgcaaaccttgttctcgcagtggcagatttaaatgccaaaaacaaaatcttagtggatatactaaagaagaatgaaatagagattcatataactaataagaaatatcaaaaatatttaagtgattcgctggagagtatattatcgaagatttacaaagactagccaaagaagattttataaatggaggatatagaatgatatttaaacctgaattaattaagggaatagccaaaacaagtcatccatatggatgtagaaaagaagtactaaaccaaatcgaatattgtaagaatgcaaagcaatttcacggtcctaaaaaagtgctgattattggagcatcatcaggttttggccttgctacaagaatttctttagcatttgggggagcgaaagctgatacaattggagtttcgtttgaaacaggaattacagataggagaactggaacagcaggttggtataataatatattttttaaagagtttgcagaaaaagaaggactaattgcaaaaaactttattggagatgcattttcagatgaagttaaagaaaatgttataaaatatataaaggatgagtttggaaaaattgatttacttatttatagtttagcatcgccaagaagaaaagatcctaagacaggtaatatatatgattcagctttaaaaactacatctggagaatttcaggggccgacaattgatatggagaaagatgaacttgttacgactaaagttaattcagcaactgataaagagatagaagcaactaaaaaagtaatgggaggtgaagattggagcgagtggtgtaaactactccttgaaaatgattgtctctctgataatgctataacaatctcgtattcatatataggagcatcaagaacatataaaatttatagggaaggtacaataggggaggctaaacgccatcttgagaattctgcacttcaaatagataaagagtggaaaaagaagattaatggaaaggcttttgtttctgtaaataaagcaattgttacaaaggcaagtgcatatataccttctttctcattgtatgcagcggtattatataaagtaatgaaagaaaagaaattacatgaaaattgcattatgcagatgcaaagaatgtttgctgataaaatatatacagaaaacccaattgaatttgatgatagtggaagattaagaatggatgattgggaacttagggaagatgtacaaagtgaagttaatgaattgtgggaaaaaataactccagataactttaaaatattatcggattatgacggatataaaaaggaatttatgcagttaaatggttttgaaattgatggagtcgattatagtgaagacattgatgtagaggcattgaaaaggctagagccataagttaatgaatgtttatgttaagaagtatcaaaatgatacttcttattttttataaatatattttagagagataataatatttcaaaaaacattgcacttgtggtataattatccggatatgcaataaatcaaatggctatgtatattatggttgtatttgattttagtgtttataaacataattaactataattaactagggagaagtgttttgaaatgagaataaaatataagcttatcgttagctatttgatcttaattgtatttgctgtaagtgtattgggtttattaattgggaataaatctaacaaagcagtttttaaagaggtaaacgaaaaaagtcagcgtttaacagaatcaattattacaactttgagtgtaagaaatgatttgcttactgagaaatcttatggagatttaaattttgcaaataacgtattaaacaatttagctgatatgagagttgattacaatgaaatcgtaaaagttggagattttaacttaccagttttatattcaggaaatcaaagaatatccttagataatactatagttgataaactaaaacaatcaacaggtagtatagcaacaatgtttttattacaagatgataaactaataagggtttctactaccgtatttaataatggtaataggatattaggtacatatatttcaagtgatactgaagcttataaaaagacactaaataatgaagaatatattggcgatattagaatagaaggaattggatatttaacaagaatgaagccaatattagataaagataaaaaagtaataggggcaatagggttagggaataaaattagtaatgattatttagacaagacattaagcaatatcaaattagggaagactggatatgcgtacatactagattctgaaggaaatgtaattcttcatccatctgatagtggaaagaatgtaagtgactacgattttgttcaaaaaatgcataatgaaaagagtggaattattgagtacacttataacggagttaagaaattaggatattatcagtattttgaagcttggcattggtatgtagttactacagcagattatgaggaattaaactcttcagcaaaatcaattttgacgaccacaatagctactgggggaataattattgttttaggcggaattatagcattatttttagctaatacattagttaagcctattaataagttgaaatcttgtatggagatagcgagtaaaggtgatttaacaatacgatgtaatatagatagtaaagatgagataggagttttagcaaatagttttaataatatgctagcagaaaataaaagattactagaagaaactgtgcagtatgaaaaattaaaaacggaatttattgctaatatgtcacatgaattaagaacgcctttaaatattatattttcaacagctcagttatttaatgtacttataaatagagatgaggatttaaatactgaaaaaatgaagaattatacaaatagtataaagcaaaactgttataggttggtaagattggtgaataatcttatagatataacaaagattgattcaggttatatgaaactagaattgaaaaatggcaatatagtacaagttgtagaggatataacacaatcaactgctgaatatgtagggtatatgtctagaacaataatatttgatacagataatgaagaaaaaattatggcttttgatgaggaaaaattagaaagaattttgcttaatctaatttccaatgctactaaattcactgaaccaggagacaaaataagtgttaatttatatgatatggatgatcatatagttatctctgtaaaagatacaggaagaggaattccagaggaaaaagtatcgcagcttttccaacgatttaagcaggtagaacgattattaaatagaagccatgaaggaagcggaattgggctatctatagttaaagctttagttgagatgcatgaaggaacaatagaagtaaaaagtgtttatggagaaggtacagagtttattatatgtcttcctgttaagattgtaccagaagataaaggtaagaaaaacaagaaaggttatgcaaaccaatctaaggttgaaaatattaatattgagttttcagatatatatagctaaacaagattgtcttgtaaattagactcatgcgatagcttgccgaaatcataaatattttgttccgaaaagctatgaaaatatcgctgaagattctaagttgcaggtttcaccactttagcatgctcccactttcagtgtgacaagctaaagcggaacaacctacaactaagaatcttagcagctaattttcaaatgttttctccacaaatatatttatgatttctagttaagataataatttatatatagtaagtatggaaatatgttcacataataagtctgggaatctatatagataaaccaattataagttagatttatactatgaaatatatcccaactagaaataagaattatgcttttgtgaaatgtttcattaggaatttgatggctctgattcctagattataagttgtttcaagtatgctagttcaaagcttgcctttgatgctagcatcttgggtgcaacttgtaatcttgggatcatccatcataattccttagaaactggaacaacagcataatccttatttcggcgagctatatgcataagttcaggtcttagttggtttatctatataatatattgatttgattgtaaattttaattgacattcttacatttagagtataaaatttagacgagtactaggggagccagaatggctgagatgagttttcagaccctttgaacctgcactgggtaatgccagcgaagggaagttataagataatataaagctaaatctaaaagtagtagatttacaatttaattagattattaactcttttcaatggtattttagtactgtttggaaggagtttttttatgcaattttcacaaagattattattgaaaggtaaacctatttgggaagcatgcttggagcatccttttcttaaggaacttagtgaggggaccttaaaggaagataagttttgcttttacgttaaacaggattatgtttatctaatagattatataaagctttttgcattaggtatggttaaagcagattcattagaagatatacaagcctttgctaaatgtgcaaatgctatagtaaatattgaaatggatgcacatactgaatatgctaagaagtttggaataacaaaggaagaactagaggccacaaagccaaatgcaagtaatttatcatacacaaagtttatgctacaagtatcatcagaaggatcattagcagaactagtagcagcgctgcttccatgtatgtggagctatgcatttattggaaaaaccttagcaaagaatagtaaggcattagagcatccactttacagtgaatggatacttacatatgcaacagaagaatataacaaggaaaatgattggtgcataaaacttatggataaactagcagaagggcttccagaaagacaacttcaaaaattagaagaaattttcattatatcttcaaaatatgaatatatgttttgggatgggtgctacaaaaaggaaagttgggttatttagatgaaagcattggaaattagtaatttatcctttggatataaggattctgggaaattaatagtagatgatttatcttttgatataaataaaaatgaatttgtcacaattattgcacctagtggcacaggcaaaagtaccctttttcgattaattttaggactattaaagccacaaaagggcaatataaatatattaaaagatggcaataaaaatattatagggtatatgcctcaaaaagattccttaatgccttggagaaatattcttgacaatacagcagttggacttgaattaaatggttatagtaagaaagaagctagaaaagtggcagccacatactttgagggttttggacttaagggaactgaaaaatattatccacatgaattatcaggtggtatgaggcagagagcttcatttttaagagcaatagtaaataatccttccataattttattggatgagccattttcttctctagatgcgttaacaagaagaaagatgcagtcatggcttttagatctttgccaaagacaaagtaatactgtgtttatgataactcatgatatagaggaagctttgcttttatcagatagaattcttatttgtacggagcttccatatagaaacctaaaatctatagatgtaaatattgaaagaccaaggaattatgagaccacactttctagtgagtttattgagctaaaaagagatattttaaatgttcttgactccttagaagaaaataaaggggggatatagaatgaaaaaaattaaagactatatatttcctttaatatttttgataattataattttggcctgggaatttataataccatattttaaagtgccgaattttattttgcctagattttctgaaatcataaaggctttagtagatcaaaaagatttaatatataaacattctcttatcacactaggtgaagcactattaggacttattgcgtccgtaattataggtatatcttgtgcactttccatatacctttggagaaatgtttcgaaaactttatatccaattataattttttctcaaacaattccgactatagctttatctccaattatggttatgtggtttggatataccatatggtcaaaggtagcagtggtaatattattttgttttttccctatagttataagtacattagatggattaaatagtgtagatagagatttagaagatgttttaaaagctcttggaggaaatagatttcaaatattttttaaactccatatgaattcagtattacctaattttttaagcagttttaaaatagctgctacctacagtatttcaggggctaccattggagaatggctaggtgctgaaaagggattaggtatatatattaaaagagcagcaggaatgcttcaggcagattctgtttttgcaggagtgttagttttatcatttctaggattaattctgttttccataggattcttactagaaaagattttattaaaatacagaagaggattgaaggaggacaatcatgaaattaagaaagcttagtatatttttactatttgttatgttagttagcttagcatttagcgggtgctctagtgcttcaaataataaggaagacaagagtgctaccaaagaacttaaagaggttaatgttcttttagactggtacccaaatgcagtacattcattcttatatgcagcagaagagcaaggatactttaaagaagcaggattaaaggttaacttaattacacctgcaggtacagatgatggaattaaattagtagcagcaggaaaagctgatttagcaataagctatcctaaacaaattatcttagctagaggtgaaaatattcctgttaaatctgttggagcaatagttagaagttcattaaatcaactaatggttcgtaaagattcaggagttaaaacattaaaagatctagaaggaaaaaaagttggatatgcatcttttgatattgataaagagactgttaaagcaatggtagcacaagctggtggagatccatcaaaggttgaatttgtagatgttggatatgacttaatgcctggaatagaaacaaaacaagttgatgcaattataggtggatatataaaccatgaaaaaatattattagagaaaaaaggtattgaattagaaacttttgcaccagcagattttggtgtgccaaataactacgaattagcatttgttgcaagtgatgacgcaattaagaacaataatgatacaatacaagcgttcttaggagctgctaaaaaaggatttgaatatactcaaaagaatcctgataaggctttagatttaatattgaaggctcaaaatgaaagtttcccattagatgaagagacagaaaagaagagcttagagatacttttacctcttatggaaaatgaaagtggtaaattcttaagtcaagataaagaaaattggaataacaatattaaatggttaaaagataagaatttacttcaagctgatgtagatagtaaagatgtgtttcaataatttatacttatgcgtatagctcaccgaaatcataaatattttgattccgaaaagctatgaaaatatcgctgaaggttctaagcagcaggttgtatccattttagcatgctccaactttcagtttgacaagctaaaatggaacaacctacagctaggaacctttaacagctcattttcaaatgttttctacacaaatatatttatgatttctagtgaacatatgaacttaaagatttagcaactttgttaatatgtttatctaataagtttaattcttaagttatttatccttatttagataaaaacagataaattatattaaaaaagatactgaatatatattgcaaaaataatcattaatcataattctaagaatattacaagaattttagacgtaattgtgaattgtgaaatgtgcattgtgaattgcaacatatagattataattcggtatcttttttttattctctaggaatttatattcaagttaaatttgtggacattgtgccccttgagtgtataagttatggaaaagactgattcagaaagttatggtttgtaagagaataaaaaagaaatcttattcgcctgcataaattgttcttatatgcacaatacggcacttaaccacagtcgcctgcgatttttttattgttttataaatactatgtgatattagagtagttctgaggaaaagctaattttactatatgaaattttttattaggatttatattttagccggtacagttggactcttgaaagaataatattgtaattatataggttgagagaaaagcaacaaattatgtgttttgaatttgttgctttttccttaaagtttacattgtaatatgtattattttaaacttggaggataatactatgaaaaaaataattaaaaacattttatttaaaacagtatttaagagtcacaataaatcgaatgtacaagtaatattaggggcatcaagacaacttaattacgaaattcaagttatagctgaaaatttatacgtaccatgggcaatagatataagtgatgaaggaaaaatatattttacggagcggtcgggagcaattagagttattgaagatggcaaacttaatcctaagccaataatgaattttaatgaaccttttgtaagtcaaggggaaggtggtttgatggggattgctctagatccaaactattcgaaaaatcattatatgtatgttatgcatacgtatggagaaggagatgtaatttataatcgtattgtaagattgattgagagtaataatagggcggttattgataaagttcttatagataaaatacctgggggacgaattcataatggaggcagaataaagataggtccagatcaaaaattatatattacaacaggagatgcaggaaattcagcattggcgcaagatcctaaaagtttagcaggaaaaatactacgaatagaattagatggaagtattccagaagataatccaattcctaattcagcactttatagcttaggtcatcgaaatcctcaaggcttagcttggaattcaaaaaatgttttgtatgagtcagagcatggacagacagctcatgatgaaataaacataattaagccaggaagcaattatgggtggcctctttttcaaggagatgaggaatctactgaaattcagataaaaaagccattaatacacagcggacaagatacatgggcgccttctggtattgcttttgcaacccatggaccattgcagggaaaacttctagttgctaatttacgtggacagcaactgcttgttatctcactaaatagagatggaagcgtagttaataatgtagaatcatggttcaaaaacgaatatggacgtttacgtgaggttattcaggctaaagatggatcaatttacattacaacgagtaatagagatggaagaggaaatattaatataggtgatgataaaattattaggcttattttaaaataaaaaaatattcaataaactaattaaatctaaggctctcattgaataaaagtcttagatttaattagttttatttgttaattgacaaaatatatttagagatatataatttatttcgaaagcgaaatattcgcatacgaaatgtttggaagcgaaatatataaagaggtgaaaattatatggagattattaatgaaagtatagaggtatcaagattatttcaagaagtaatgagtttatttagattaaacatgaaaaaaataatagaacatactggaatgacagctcctcaaggtatggttattggactattacataaaaataagaagatgaaagtgactgaattaagtaagcagctacatttacctaatagtacagtatcaggtattattgataaacttgaagaacaagaggctgttataagagaaagaagtgaagatgataagagagttgtttatgtaagtatatctccgaaattcattgaaatgcataagaattttaataaacaaattgaacataatattgagagtatactaaatcaaggaacacaagaagagcttaataagatttctgagggactaataatattcaaaagacttttaagtgaaaataacactaattaaggagagtgcgctaatgattaaattgtttagatttttaaaacagtacacagttaatataataataattgttttattagtttttacacaagtaattgcaaacttatatctgcctacattaatggctgatatagttgataaaggaattgttcaaaaagacgtagttcaaactatatcgttccttggttataacggtgaatatagtggagttgattatattctaagaataggaggattaatgcttcttgtatctcttggaggtgcaatttgtgcaattatagcatcatttttatcttcaagaactgcaataggatttgctaaaataattcgtaataaattattcgcaaaagttgaaagtttttctttaaatgaatttgataaatttggaacagctactttaataacaagaaccacaaatgatgttacacaggttcaatcagttacaataatgatgttttcaattgcacttttcgcaccattgacagctttaggcggagttgttatggctctaagagagaatgtaactctaacatggatctttgcggtagtaattccactacttgcagttataatagggcttactttaaaatttgcaatgcctttatttaaattgatgcaagttaaaatagataaattaaacttagtactacgtgaaagccttacaggaataagagtagttcgtgctttcaaccgtataaatactgaaaaggttagatttgacgatgcaaataaagatttaatgaataatgctataaaagtaaataaaattatggcaattttaatgccaataatgatgtttataatgaatgctactactgtagcagtaatttggtttggaagtataagaatagattcagggaatatggaagttggatctttaatagcctttatgcaatatggaatgcagattttatttggtttcttaatgcttggtatggtatttataatgattccaagagctcaagcttcagcagtaagaattaatgaagtactagatatggaatctgaaattatagatcctaaaaagccattattaaatgaaaatgaaggcggttatgttgaatttaaagatgtaagctttagctatccaggtgcagagcaagaagctattagtaatatatcatttagtgcgaaacctggagaagtaacggctataattggtggtactggttcaggaaaatcgacattaattaatatgataccacgtttttacgatgtaactaatggttcagttcttgttgatggcattgatgtaagggaaatgagtcaggaaagtataagagctaaaataggctttgtacctcaaaaaactgttcttttctctggaactattgctgaaaatataaaatacggtaaagacgatgctagcatggaagaaattaagcatgcggcagaagtagctcaagcaacagatttcataaatggaatggatgatggatatgagcatttaattgctcaaggaggaactaacgtatcaggaggacaaaagcaacgtttatcaatagcacgtgctcttgttagaaaaccagagatatacatctttgatgatagtttttcagcccttgattttaaaacagatgcaagacttcgtgcagcattaaaaaaggaaacagtaaaatcaactgtaattcttgtagcgcaaagagttgcaactgttatggatgcagatagaattatagttttagatgaaggacaaattgcaggtattggaactcataaagagctattaaacagttgtaaggtatattctgagattgtatcatcacaactttcagaggaggaattatcatgagtgaaaatcgtaatagagtaaataaaagatcaggtggcggttttggcggtggtccaatgggatcttttgctggcccaaaagtaaaagcaaaggattttaaagggacattaaaaagacttttaaattatttgaaaccacaaagaatgaatttcattttagtttttatatttgctatagcgagtactatatttaatatagtaggacctaaaatttcaggtaaagctataactagattagttgaaggattagtaggaaaatttactgtaatgtctcaaaatgctgcattacttaaagcaggaaaaccaggtaatataccagtaccggggattgattttcaatatataggagatattctcttattactacttggcttatatgtaatcagtacactttttggcttccttcaacaatatattatggcaggggttgctcaaaaaacagtatacaacctaagaaaagaagttgaagataaaatttcacgtttaccacttaaattttttgattcaagaactcatggtgaaattttaagtcgtgtaacaaatgatgttgataatatttcaacaacccttcaacaaagtttgactcagcttattacatctatagtaactattgttggtgttattatcatgatgttaactataagtccaataatgacattagtagtaatattaacattaccactttatattgtaataacaacacttgttgctaagcattctcaaaagttttttgctgctcaacaaaaagaagtaggagaacttaatggtcatgtagaggaaatgtatacaggacataaaatagttaaggtttttggacatgaaaaagattcaataaaagaatttgaaaatattaatgatagactttataaagctggatggaaagcacaattcatatcaggtataataatgccaatgatgagatttgtaagtaatataggttatgtaatagtttgtgttgtaggtggatatttggctacactcggaaaaattagtattggtgatattcaagctttcatacaatactcaaatcaatttacacagccaatagttcaaactgctaatattgctaatataattcaatcaacagttgcatctgcagaaagggtttttgaacttttagatgaagttgaggagattccagatactgctgatgctaagattatagaattccctaaaggtgaagttaaatttgataatgtcgattttagctataaaccagaagaaccacttattgaaaacatgaaccttgatgttaagcaaggtcatacaattgcaattgtaggaccgactggagcaggtaaaactacactcgttaacttacttatgcgtttctacgaaataaattctggtaagataatgatcgatggtgttgatattagagatataaaaagaggtgcacttcataacatgtttggtatggttcttcaagatacatggttatttaacggaactataatggataacatagcttatggtagagaaggtgctactgaggaagaagttattcaagcagcaaaagcagcacatgctcatcactttattaaaactcttccagatggatataatacaatattaaacgaagaagcttctaatatatctcaaggccagaagcagcttcttacaatagctagagcaattctagcaaatcctactataatgattcttgatgaggctacaagtagtgttgactcaagaacagaagtttatatacaaaaagctatgacagaacttatgaaaggcagaacaagttttgttattgcacatagactttctacaattagggatgcagaattaattctagttatgaataagggaagtatcatagaaatgggtaaccataatgaacttcttgcaaagaaaggtttctatgcagatctttacaacagccaattctctggagcaaatttagatagtgaagtaatgtaaattataatagtttaaggatagtagacgatagtgatattgtttactatcctttatttatgtctaggaaagtataaaaattccgaacgctgaaagcgacttgtagacttgtattgagaagctatatgtggtaaattgatgaaatgattaagagtaaattaagaagaatattagaagaaaattggaacgaattttataaaaaatatagaaatagaataagacctaatgtcattgcagaaataaaaaaagttatgaaatgcaaagatataaataatggctatattgaattaaaatgtcatgattgtggtgaaataaagaaagttggttttacatgtaaaagtagattctgtacatcatgcggtaagatttatgttgataattgggttaacggaatgctaggaaaattaataaatgtaaagcataggcacatggtgtttacaattccggaggagcttagaaattattttggaagagaaagagatagattgaggttacttccgcaatgtgcagctaaagctgttacgagttggatgagtgatcaaaataaaaaagaagaatttatccctggaattatatcagtgatacatacttttggccgggatttaaagtggaatcctcatgtacatatgatggttacagaaggtggaaagggaaaagtaacgatatggagaaattttaaatatttctcatatgaagcattacgaaagagatggcaaaaaatattactagatgcaataataaaaagagaaggaaataaagatagttttagacgattaaagaacaagatatataaaaataataaagaaggattttatgttcatgctaaaaatgaaataaaatcggcaaagatagcagcaaaatatatagggagatatgttggccgtcctgcgatagcagaatcaagaatacttgcgtatgatggtaaaagagtaacctttaaatataaaagacacgaggataacaaagaagtaatagaaaaagtgcccgtgtttgagtttataaaaaaagtcataatacatataccagacaaaaactttaaaatggtgagatactttgggctatattcaaggagaagtaaggataaagatcaatttattaagatgatagataaaaaaatagtacaaattaaaaaatccatagaaaggtgggaatataggattcttgcctcttttggtgtagatccgtgtaaatgtcctaaatgtggaagtaaaatgaaatttaacgatatagtgtatccacgatacggctcgatgcgagaatattttaaaaagaaatttataaatgaaggtaaagaaaagttagaaaacattctggaaatatatgcaattgcaaaaggagttctatatggtaaaataaagccgacaacaacatagttggagggatactaagtgaaagacattgtatcatataaatgtttaaaatgtggaataacagaaaatatacctagggaggttgtagaatactttgatgagatggatcaaagtaacatagatgaaccgccttgtttttcatgcgaaaaatgtggcggtactatgagaccaaaagaatacgatggggtatatgggaaaaaatataagttgtgataagagaaacatagagaaaatgcaatctctatggtttttgctttaattattaaaaatttctccgaaggagcgtggcgcagccactttgttcttatacaaggaaatggatttttataattctaaaaatatttcgagaattttattcgtaattgtgaattgtgaagtgtgcactgtgaatttcaacagatatatcagaattttataaataaatagtaattaatagcactatataataaaaagcctaagtgataaaatataagtaacgtatgtatattgtaaaaataattcttaatcataattctaaaaatattgcaagaattttgactgtaattgtgaaatgtgcattgcatatatattaatttttatttttaaatttatctgaaatatatggaggaaagaaatgagtaatattaacaatgacaataatttaggaaacataagaaaagcaagaattgaagatttagaaactatagtaaaatttaattacaatctagcaaaggaaacagaggataaagaacttaatttagaaattctaagcaatggtgttaaagcgatgatagaagattcatcaaaaggacaatactatgtttatgaaataaatggcagagtagttggacaaattatgtttacatatgaatggagtgattggagaaatggtatgtttctctgggtacaaagtgtatatgtagattctgagtatagaaaaaaaggcatttataagaagttgtatcataatgttaaaaatatatgtgataataatgagggaatagctggcataagattgtatgtagaaaaagaaaatataaatgccaaagcaacgtatgagtcacttgggatgagcgaatgtaattataatatgtatgaatatgaaaaataattaggcggataagattactgcctaggatctaagttagcagaaagctgcaattttcattaaagagagtttctatgagttttgttcatatatagatgaacatattaacaaagttgctaaaactttaagttcatattttcattagaaatcataaatatatttgtggagaaaacatttgaaaatgagctgttaaaggttcttagctgtagggtgttccatttttgcttgtcaaactgaaagttggagcatgctaaagtggatacaacctgctgcttagaaccttcagcgatattttcatagcttttcggaatcaaaatatttatgatttcggcaagttaccacataaatatagttttaaagtttgatatctatatatatgttgcaataataaacttacatttaaacttttagtatgccaagtgctctattaatacaaaatgtagaaacttaattgcaacatatataaatcatattttacaatagaagggaagtgagaattaaaggagagcgtattaaatcctctcttttaataatattatgaataataaaaaaatagtaagagacggacatatgcactcgccatattgtcctcatggaactaaagacagctttgaaatgtatgttgacaaagcattaatagagggattagaggaaataacatttactgaacacatgccatttccgtgttattttatagatgataaagaatttcaagatgaatgtgctccaaatgaagaagcaatacagaagtattttaaggatgttgaagaaataaaattaaaatataaagacaaaattaaaataaatataggactagaagttgattttgttgatggatatgaaaaagaaactaaaaaactacttaattcctatggttcaaaattagaagatgggctactttctgtacattttataaaaatgggcgatgaatatgtggctattgatggaaaagaaggttttgaaagagctttagagttttatggtaccactgaaaaagtttataataagtattatgagactttgcttaaggcaataaaatcagatttgggaaaatataaacctcgtcgtataggacatccaaatttaattaggatttttaataaattatacccattagaatataaaaacaaagaacttttagaagaaatagtaagagaaattaaatcaaggaattatgaagtggatgtaaatacagcaggccttagaaagccatattgcggtgaaatctatgtgtcagatatatttaaacagttgatagatgaatacgggattaaaaaagtatatggatcagattctcacacagcaagtgatgttggaagagattttgataaagaataaatttcagatatcagcagtaaaactatatttaggagtgagatatgtcattagaaggtattaattttattaaagaaattacatcttttatttttgttgatgataaaccagaaaagtgtgatattatttttgtacctggcagctcatggtcggagccagcagaaaaagcttcaaaactttggttagagggatatgcaccatatatacttccatcgggaaaatatagcatgtcaaaaggatacttcccaggaccaataactaaggctgaaatatataatggagcatataacactgaatgggagtttatgagagatatagccatatctaatggagttaatggtgatgcaatattaaaagaagatagtgcaacttggacaaaggaaaatgcctttaagtcaaaggaagttactgaaaactataatttagatataaaaaaggccataatatgttgcaaatcatttcatgccaagagatgtctcatgttttatagttatgcatatccaaagacaaaattctttgtatgtccaatagatgtagacggaataactaaggaaaattggttcaaaactgagaatggaattgataaggttatgggagagttatcgcgttgtggaggacagcttaagaaagcagttcctacctggtcctaaatgttgtaataattctaaaaatattacaagaattttagccgtgattgtgaattgtgaaatgtgcattgtgaattgcaacatatatatactctgaaaattaaacttagcagaatcaacattaaactataatgtaataagaaaaatagcattgattataacgtatatattatagatcccataggtagctttatagcgacttatgggattatctatttttgaaagttttaatattttataaatatagtgaaaaaatatatgctattttgtaacaataattttattgatgaataaagtggctatatagattgttatatatttagtgttaaaaagtggttaaaatatattgtttgaattgacaatatatagatgaagttttatattgtatatagatagatgtctatatagaaggagtggaacagaatgaattacgatgagaattcaaagattttcaaagcattatcggattcaagtaggttaaaaataattgatatattatcatgtggtgaaagatgtgcttgtgatattctagaatattttgattttactcaaccaacactttcgcatcatatgaaagtgttaagtgattgtgggcttatagaagttaggaaggaaggactttggaattactaccgattaaatcttaataattgcaataaacttaccttatttatgatgaatcttgtgacagaaacaaaagattgtatttgtaatgataagagtaaatgtacttgtaaataagaatgtaaaaactaagtatgtctgtaaatcaaatttaagtataaaaaattatgattgtaaaggagttaataaaaatgaaaaaaatgattatttttgatccagctatgtgttgctcaacaggtgtttgcgggccatctgtagataaagaattattaagagttgcaactgcacttaatactttgaaaaacaaaggtatagtagtggaaaggcacaatttaacaagtaatcctcaaatatttgtagataataaagtgataaatgaaattttaaacactaaaggtgttaatgctttacctgtaactatggtagatggagtagttgttaaggaaggaagttatcctactaatgaagaattttgcaccttattagaaataccagcagatactttaaagcttaatataaagaaagctagcataaaaaagcctgctaaaagctgtggatgtaaaggtggatgctgctaataagattttaggtacactaaaacaaattggtacacttaagtagaagggaagagtaaattatgttgaaactgtttgatattgaaaagctgaacttaactaagtatctattttttactggaaaaggtggagtaggaaagacttcaacagcttgtgctgtggctgtgaatttagcggatcaaggaaagaagattatgcttgtaagcactgatccagcatcaaatcttcaagatgtatttaatacagagctaaataataaaggcgttcaaataaaggaagttccaaacttaactgttgcaaattttgaaccagaagctgcagcagctgaatatagagaaagtgtaatagccccatatagaggaaagttaccacaagcagttatagataatatggaagaacaattatcaggttcatgtactgttgaaattgctgcatttaacgaattttcaggaatgataactgatgaaaaagtatttaatgaatatgatcatattattttcgatactgcaccaacaggtcatactttaagaatgttacaattgccttctgcatggagtaattttattgatgaaagcactcatggagcatcatgcttaggtcagcttgcgggtcttgaagaaaagaaagagatgtacaaaagtgcagtggataccttggctgatggagagaaaacaacacttatacttgtatctcgtcctgaaacctctccgttaaaagaggcagaaagagcttctagtgaacttcaagaaatcggtgtaaataatcaaatattaattataaatggcgtgcttcaaaatcatgatgatgaactatcaggtgctatttatgaaaagcagcaaaaagctttgagcaatatgccagctaaatttaataatatagagacttttgaaattcctctaagaccgtataatataacaggtcttgagaatgtaagggctttccttaaaaaagattatattaaaataagtgaggaatctttaaatccagtggctatgccaaaattaaaagatgtcattgaggatttatataatagcaacaaaaaagttatctttacaatgggtaaaggtggagttggcaagacaaccatagcagcagctgtagcactagggcttgctaaaaaaggtaagaaggttcacttaacaactactgatccggccgctcacttaaaatttgtattagatgaaggctatggaatatctttaagtaatattgatgaaaaagaagaactagaaaagtacagacaagaggtactaggtaaggcaaaagaaaataatatgactgatgaagatatcgaatatatcgaagaagatttacgatcaccttgtactcaagaaatagcagtatttagagcatttgctgaaattgttgaaaggtcagaaaatgaagttgtagtaatagacacagctccaacaggtcatactttgcttcttttagactcaacagaaagttataataaagaaatttctagatcagaaggggatataccagaatcagttataaagttgttgcctagattaagaaacgaaaaagagactgaagttgttatagtagctttagctgaaacaactcctgtttatgaagccatgagacttcaaaaggatttagatagagcagagattcacagcaaatggtgggtaataaattcaagtctttatgcaactaatactactaatgaaatattaaaggttaaagcaagtaatgaaattcaatggataaacaaagttgatgaaatttctaatggaaactttgcagtgatagagtggaaagcagaagacgtaagaggaaataacttgattaacctaatccaataaacttattttaaggagagataagaaaaatgaaaacgaaagttgcatttatatgtgtacacaattcatgcagatcacaaatggcagaggcactaggaaaactttatggaaatgatgtttttgaaagttattcagcaggaacagaaacaaaacctcaaataaaccaagatgcagtgagaattataaaggagttatacaacattgatatgaatgaaacacaaaaatctaagctcttaagtgatattccagaggtggatattgtagtaacaatgggctgtaatgttcaatgcccatttttaccctctaagcatagagaagattggggcttagaagatccaagtggaaaaagtgatgaagaatttataaaaacagctaaaaccatagaagaaaaggtaaaagaactagctagaagaattgaaaataaggaaatcaaattagactagtaaattaaaaatagggggatttttaaaattgagtaataaatcatcgagattatcattcttagataggtatttgactctttggatatttgttgcaatggctctaggtatactgctaggatggggaatgccatcattatcacagggactcgcaagtttatctgttggaacaacatcaataccaatagctataggccttattgttatgatgtatccaccacttgctaaagtaaattataaggaactaggaaaggtatttaaaaatccaaaagttctaggattatcgttagtacaaaactggtttattgggccagtattaatgtttatacttgcttttgtgtttttaaaatctgattcagaattaatgactggacttatccttattggacttgctagatgtatagcaatggtaattctttggaacagcttagcagatggagatagcgaatatgctgcagcgttagtagcatttaactcaatattccaagtagtattttattctgtatttgcgtaccttttcattacggtacttccacctatatttggccttacaggatatgaagttcatatttccatgggagaagtggcaacgtctgttgcaatttatcttggtattcctttcttactaggaatgtttactagacttatactagaacctatgaagggaacagaatggtatgtaaaaaaatttgttcctaaaattagtccattagctttaatagccttattatttacaattgtagttatgttcatgtttaaaggaaaatatattgtagaattacctttagatgttattaaagtagcgataccacttgtaatatatttcatagtaatgttttctgtatcattttacattagttataagtcaggcatagattatcataagactactactttatcttttacagctgcaagtaataactttgaacttgcaatagcagttgcagtagcagtatttggaattgaatcaaaggttgcttttgcagcagtaataggaccactaattgaagtgccagtaatgataggactagtaaatgtagcattgtattggggaagaaaatacttctcatactctaaatagaaacttttaatcatataccacctacattagaatatttttcgataattagaaattactttaatatatattaaatgaatacatttcatttgaacaatttctgtaataataaagatctcttaaaatgaggtctttatttttttatcagtatttatacctatttctacaatttggctacgagcctttatataaaaaaagaaatacaatgcttaaataatgtaacataaattcatccttcttcataaaatatgttaaaggcaacaaacttatgataaggaggaattgatattatgtcagttcaatcaggacaaatagagattactaagactgcttcaccaagtttatctaaaataggagatactgttgcatatacaataaaaatatgcaatataggaagtacaccattacagcttgttaatgttaatgatcctttactaggaggagatattacaagtaattttaggccaacacttgcacctggagaatgtgatacagttacaataaattatgtagttgctgatcttggagtagatccgcttataaatacagtaacagctaattatgttgcatctttaaatgttagtgatagtgttgctgttaatttatttcaaccttctgtcacaatagttaagagtgggccaacttatagtaaagtaggtgatactataacttacacttatgtaattactaatacaagttcggctgattcacctaatcttattctaaagagtgttgtagatgttattaataatgttccagtagatcttactcaaacagcaataaatgctggagcatctaatttagcgccaggggcatctgttactttcaagagtacccatttagtaacagctagcgaccctaatccgctcatagacactgtagttgccacttacaatccttctggatatccaaatgtaatttctgattatgatagtcattcggtaatattattaaatccaagcttcacagtagaaaaactttgtgtatctggagcagctgtagcaggtggaacagcaacatttagagttaatatcactaacaccggtgatgtgccattaaatatatcagctttagatcaaggtaaagtatatacaagtaatggactagcaccaggatcaactttcacatttactgttcctgttactgttcctgtagggcaatgtggtggtagcataacaaatgaagtttttgttgtagtaacacttccagaaatatatggactttcaaacacttatacagcaagtgcaagtgcaacttgcccaattgtgacactaggtagaactagaggtttctggggaaataataatggtcatgcaatccttgatccaaatggtgatggactaattaacaatcctgtaacaattggtagtggtcctcgatcacttttcatcaatacaattgctttgtctgatattatattagcaggaaattactgtagtcttccaggaagtccatgtcaaaacaatttgagtgatagtttaaaaccaaatacacttggagttctcatggctcaaacattagctttggcttataatattaataatatccaatgctatagtggccaattggtaagtactcttggttgtggtaatttactaataccagttggattaccttctaactcaacagtaaatgatgtattgagtgcagcaaatcttttaatcggaaatactactgcttctggtacagtcactcaagatcaagcaagtgcaatgattaatttaatcaattgcttaaatagagaaactttctaattatgattttttgcgcgtgaaatttagcaaaattattcttggctaattttaaaatgaaactaaactaataaaaaatccatagtgaccatcccgtgttatgatttaatgaccaaaccaaaacgtacacgaaggataatcactatggactatcaaaataataaaacggaatcacgtaataatagaaaactcatgattatctagctatattcttataatgtaaaataaagaaagagctaaaacattttatttaatcaaaaatattaaaaaaataaatttaagagtttaattcatacataaaatctagttaagcttgttaggcagtttataaagtaaatttggtatattaaataaggaaaaacatttacatcaccacattaacaaatataatttctaaatcatataatagtgcagataacatttgataggagaagaaaaatgattaacaaaaatgggtattacaatgaacatggacaatatgtaaatcctccaaataaatttaattgtgaatcccgttgtagagatgatagaatatgttgttgctgctgttgtagatgtggtccaggtttacctggcccaataggaccaacaggggcaactggagcaataggtgcaacaggagtaacaggtccaatcgggccaacaggagtaactggagcaattggagcaacaggagtaacaggtccaatcggaccaacaggagtaacaggtccaatcgggccaacaggagcaactggggcaataggtgcaacaggagtaacaggtccaatcgggccaacaggagcaactggggcaataggtgcaacaggagtaacaggtccaatcggaccaacaggagcaactggggcaataggtgcaacaggagtaacaggtccaatcgggccaacaggagtaactggagcaataggtgcaacaggagtaacaggtccaatcgggccaacaggagcaactggagcaataggtgcaacaggagtaacaggtccaatcgggccaacaggagtaactggggcaataggtgcaacaggagtaacaggtccaataggaccaacaggagcaactggggcaataggtgcaacaggagtaacaggagtaacaggtccaatcgggccaacaggagtaactggagcaataggtgcaacaggagtaacaggtccaatcgggccaacaggagtaactggagcaataggtgcaacaggagtaacaggtccaatcgggccaacaggagtaactggggcaataggtgcaacaggagtaacaggtccaataggaccaacaggagcaactggaccaggtggaagtactatttatttaggtacagaccagtcacttggaaacaatgatttcttagggttaggtacttcatcaccaagttttattagaaacaccttagtagtaccgcaaaatgcaactcttatagggatagttttaagtgttagaacagaaccattagcagtaggagatacagtaagtgctaggataattagaagtacagattgtggaaatactacggtagatactggaattatcgcaactgtaactggtcctagcagcgcagcagctccaaattgttgtgcagtatcagtaagtcctccagttgcagttaataggtgtgatttgttagcagttcagattacacgtactggtaatgttagtgcattagcaaatggtgctgcagcaactatcatatttagtattccttaataaatttagcgtttaaaaatcaataatctaatggttaagtataaaaaatgtaggatgttatagtaggaaccatgataaaaggtaagagataaagacatatttatctcttactagataaataatttattattcaatatttagcatggggcaaataacaagaaaatttaggggatattataaaaaacaaaatcatttaaaatgtttattattatatatttagatgttacaattatctgattaaaaatgctattttaaattgagctattaataaggtagtgcttcttaatatatccatatgtacaagggagattattaaaaggattattattaaaaattagggctcataatatggctcttaataagagttataaaaattcttaagcatagcaatatgccatatcacaatacttaacataactaaaaggagatttgaaaacattatgaaatattcatatgaagaaggtaactttagaaaaggagatatactaaggattactattgacagaaaggtaaatatttatttattagatggtgataattttactaggtatagaaataataatagttttaaatactatggcggtccagttgatagctcgccttataacattacagttccgagttctggtcactggtatattgttatagatttaggcggaggggcaggaattctaaactattccataaaagtatttagataaaatacatatgcactaatccaccgaaagtagaaacattgttatttcacaggactatgaaaatttcgctgaaagttctaaattgtaggttgcactactaatgcttgctcccaatttcattgtgacaagcgttagttgaacaacctacaattaagagcttttaacagctcattttcaatgcctgctgcataaaaatgtttctactttctagtgtggtatttattgcaaagcatgaatcaaattcttaagttgtttatctatgcattaataggcatgatttagctttagcgtacgtttagatattgcctaaataatacttcatcataattctaaaatattaaaagaattttaaggggaattgtgaattgtgaaatgcgcattgtgaattgtaacatatataaatttatattaaatttttgtggtattttaaaataagtaaatggattttgttttacattgacaataataggataaatatattattatatacaaaatatctaaaatgtaaaaggagtaagataaaatggcatattattttaatgaaccatcccatacttttggagaatatttattagtaccaggttactcttctgtagactgcataccacaaaatgtaagtttgaaaacacctcttgttaagtttaaaaagggtgaagaatcatcactaagcattaatatacctttagtttcggcgataatgcagtccgtatcagatgataaaatggcagtagctttagcaaaagaaggcggagtttcattcgtatatggatctcagtcaattgaaaatgaagctgctatggttgcaagagttaagaactataagtcaggctttgttactagtgattctaacatcaaacctgatactactttagaagaagttgtagaaataaaagagagaacaggacattctactatggcagttaccgaagatgggactccaaatggaaaacttcttggaattgtaacaagtagagactatagaataactagaatggatttaagtactaaggtttcggaatttatgacacctttcagtgaacttatatatgctgatgctaatataagtttgaaagaagcaaataacattatttgggataataaattaaatatgctgccattagttgataaaaatcaaaaattaaaatacatggtattccgtaaagattattcagctaataaggagaattcaaatgaacttattgattctcaaaaaagatacatagttggggcaggtattaatactagagattatgctgaaagagtaccagcactaatagaagctggagcagatgtgttatgtattgattcatctgaaggattttcagaatggcaaagaataacaattgattatatacataagaattttggagaaaacataaaagtcggagctggaaatgttgttgatagagacgggttcatgtttttagcagaagcaggagcagactttgttaaagttggaataggcggtggatctatctgcataactcgtgagcaaaagggtataggcagagggcaggcaacgtctcttattgatgtagttaaagctagagacgaatattttgaaaagacaggagtttatattccagtatgctctgatggcggtatcgttcacgattatcatattaccttagcattggctatgggggcagactttattatgttaggaagatatttctcaagatttgatgaaagtccaactaataaagtaaatataaacggaaactacatgaaagagtattggggcgaaggttcaaatagagcaaggaattggcaaagatacgaccttggtggagataagaaattatcttttgaggaaggtgttgattcatatgttccatacgctggaagtttaaaagacaatgtaagtataacacttaacaaagttcgttctacaatgtgtaattgcggcgctcttactattccagaacttcaaaagaatgcgaaaataacattagtttcagcaacaagtattgtagaaggaagttctcatgatgtaatgttaaaagataatcactataatgctcaacagtaaagagaatatactatgaggtaatttcaaacttacaagatgcagttcaactgtttcgcaaggaattatagagagtttgcaaattaaaatatgaaattactcatagttaatattaaatgttttaataataaaaaattaaaattgacattatttaatccatgtcatattatatagtatatagatttcattggaaggaagtatttttgtgagtgtttagtatcttaattatagtaatttaatattaattcaaaaaagaagtattttatacttttatttcttgttgaattaattataactattaaaagatacgagccacgaatttgctttcaaaagataggtatatttctatctttatttgatgttgaatttttagctgtggaggtatccacagctttttttgttttatgctttggcattcagaaaaccaactgctaagcgggtgggcttgacttatttaaaaatttaaattatatgtattgcaaaattactatccataataattctaaaaatcttggaagaattttagcggtaattgtgaattgcaacatatatgctttatgaatggtatacattgcattaaatattagtttgctgagtagctcaattttgaaatctataaccttgttcgtggcttgaatatataagaaaaggaaatgaaaaaatgaataatgccacattagaaaaattaaattataaagaattaaaagacatagtaaaatcatattgtgtaagtaacttgggaaaaaagttgattgataaattagttccaagtaataatataaaacaagtaagaagaatgattaaagaaacttccgaagggagaagactaatcgatgcatcttaccatatgccccttgaaggagtttttgatatatctccattaattgaaaaaatagaaaaaggtggggttttggagccagcagaagtgattacagtaggagattttcttagaggatgtagaaaagtaaaagcattcgttaaagataaagaaggacatgcagaaaccttaagtgcatatggagaaaatattacagatttaaaatatattgaagatgaaataaatatggctattagaggaactattgttgattctaatgctacaaaagaacttaaaaaaattcgtaggagcattgagatttgcgaagaaaagataaaagaaaagatagagaaatttattaagaatccaagcaataaagagtatatgcaagaattttttgttagtataagaaatggaagatatacggttcctattaaagctgcttataaaaatcgtgtacaagggactatagttgaagcttcttcaaaaggcactacagtgtttatggaaccagcttcagtctcaaaatatacaactgaattaatagctttaaaggctgaagagagtgttgaagaatacaaaatattatctacattaagtgaaatgatttttcaaaagcatcaagaaataaaaataaatattgaagttatttcagaatatgacatgatacttgcaaaagcaaaatatagcaaggaaataaacggaattgagccaaaactaaatgattatggctatataaaaatagtaaagggaaaatatccattaattaaagagtgcgttccactggattttgaaataggaaataaatatagaagcttaataataactggtccaaatgcaggtggaaagacagttgtattaaaaagtgttggattacttactttagcagcattaagtggatttcatataagtgcacatgaaaatactgaaattgcagtatttgatgatatttttgttgatattggtgataatcaaagtgtagaaaatgctttaagtacattttcatctcatgtaaagaatttagcagagattttaaaagaaagcagcagaaattcattattgctttttgatgaaattggaagtggaactgagccaaatgaaggagcagcacttgctattgcaattttagaagaattttatcataaggggtgcattacagtagcaagcactcattatggggaaattaaaaatttttcgcaaaatcatccagacttcgaaaatgcagctatggaatttaaaagagatactttggagccattatataaacttcatataggaaaaagtggagacagtaatgccttatatatatcaagaaaaatgggtattagtgataatataattgaaaaaagtagaaaatatattcaaacaaaagactataattatagtttagtaaaagaaagtaaaattcctaaaagagaaatagaaaaatctgaaactcatgagtatatttatagagttggagataaagtattactgttagataaaggtgcaagtggaattgtctataaagaaattgatagattaaataatataactgttttatttaataatgaatttatagaagtaaactataaaagaattaaactcgaaattagcgcagaagaattatatcctaaagattatgatatgagtcaattattttcaagctataaagaaagaaaacttaatagagatattgaaagaggatctaaaaaaggactcaaaaaatttagaaaacaggaaggtatataaatatctaactttaaaattaagtttatgcgataacttaccgaaatcataaatattttgttccgaaaagctatgaaaatatcgctgaaggctctaagcagcaggttgtatccactttagcatgctcccactttcagtgtgacaagctaaaatggaacaacctacagccaagaacctttaacagcttattttcaaatgttttctacacaaatatatttacgatttctagttaagatatgagcttaaagttctagcaattttgtaaataatttttaagttgtttatctataagaacgaaagaatataagaatttaggaataaaggaatttaagaatgtaagaatctaagaatttaaattcttaagaaggaaagaacttaaaaagttaaaagtgaaaatatcgttacagaaaaaaatataaaaagttaacaatttataatgttttcaatgctttgaataattatatgtagtgcaaaaataattcttaatcataattctaaaaatattgaaagaattttagctgtacagtgaattgtgaaatgtgcattataaattgcaacatatatattaaaaagaggttgtcttatagaggtgtatgaaccaataagataacttctttttataaaaacacaatggtgtattaattctttctaattcaggaaacatgtatcaagtaagcctttttattggtaaataataatgctataatatgaacagattattacgcatgtcatagtgataattttactgttactgaatgaattggaggaaacacatgaaggaaaatttggaagttacattaaagcaaatgattcatatcattcatagagctattaattctgtggataaaaggcttttgaatcatggagaaaaagttgcatatataatgttaaatttattaaaagcaaaaggaaattataataatgaagatatgcttaaaatttgcgtcatatcaatttttcatgatatcggtgcatataaggttgctgaaagagataagcttgttgatattgatgtaaaaactccgtttgatcatgctatctatggttcattatttataaaatatttttctccgttacctaatttatataatatagttctaagccatcattttacgtgtaagtattttaaggacaagcacatggatattctatctaaagaaggaatgatcttaagttttgccgattatattgatagggtatatttatcaaaaaaagaattaacgaaagattttattagaaatcatgcagaagaatattcaaatgagtatatagaattattgctggaagcagatagaaaatttaattttattgaaaaattaatagataaaacttatgttgatgagttgtatgatttttttggtactagaatacttacaagagatgaagttgtatcatatagcaaaatgttagcttattcaattgattttagaagtgaagcaacagttaaacatactatattagtagaagctgtaagttatcaaattgcaaagttgtgtggggtagatgagaaaactttatcaaaaattaaagtggcagctgcacttcatgatataggaaagattgctattccagtagaaatcttagaaaagcctggtaaacttacagacgaagaatttgaaattatgaaaagccatgccattataggatatgagattttaagtgatctaaatatagatgatataagagatataggaacatttcaccatgagaagttagatggtgcgggttatccgtttggactaaaaggaaatcaattaactaaagaaatgagaatagtagcaataggggatattactagtgccttgttaggtgtaagaagctataaggaggagtttagtaaagatagaataataaaaattctaaataacatggctaaggataataagattgatttacatattactaatttgcttatagataattatgattttataattgatgaggcaaaaaaacaagctagtgatttaatggcaaaatatttgaatataacgactgaatataaacaattattaaagaaattttcgtaaaaatgagtaaatatcatatgatcccaagcaattaattatatgtgatatataactaattgcttgggatttttagttgaaaagttatttttcatagaatttctaaatttctttagaaattctttcgatttaattgtaaactatctttatttttcaattgtatattttacttgtagctaatcagtatataaaaaataatgcgttgtatttgaggttataacttttgttttaatttaacgtttggattactaggagcttaaatgcaaatctgttattgcggcatatatcatctaagaataggaggtgtttatgggagaatctttaattctataatttacaatcttgaattttataaaaataagactagtaggaaagtatatttatgagtttggaaatgcttcacatatgatatataataaattttatgtgaattttattccaagttaaataagaataggaattttaatataggttatgagattaattaaatatatattgcaaagataattcttcatgaccattctgaaaatattgcaagaattttagctgcaattatgaaatgtgcattgtgaattgcaacatatatatgaattaatttctatttgtaaattatagtaagtgagggtgttaaagagtaatgaatttttataatgttttagtagttgaagatgaaaaagaaatatgtgatggaatagagatatacttgaaaaaccaaggctacaatgtttatagagcaagcaatggaatagaaggattggagataatagaaaatcaaactttgcatttagcaatagttgacataatgatgccaaagatggatggaataacaatggtgatgaaactccgtgagaattatgattttcctgtaataatgcttactgcaaaatcagaggagatggataaaattctaggtcttaatattggagcggatgattatgtaactaagccatttaatccaatggagttaatagcgagagtcaattcgcagcttagaagatattcaaaatatttaagtgttgtaagtggagctgaacaaaaaagtaatgtattttcaattggtggtttagagttaaacactgatacaaaagaagtgattcttgatggagaattaataaaagttacaccaatagaatttaaaatattacaattgttaattaaaaatccaggaagagttttttcagcagaagaaatatatgaaaaggtgtggaatgaggaagccataaatactgatacagtaatggttcacgttaggaatataagagaaaaaatagagattgatacaaagaatccaaaatatttaaaggtggtatggggagttggatacaaaattgaaaaacagtaaaaaatcatatgttacaaatttagtaacatttattatatttttaataatgtcagtaggaatatttaatatttatcctaacatgaggggatgggcaaaagcagagcctaaatctccatttgaagaagatgagttcttaagaactatttataaaaatgattatgttttatataaagatcttgtaggacagacaaatcatgaagaattatcaggtgataaaatttatatatcatcctatgatacacataatgatactgaggataatattattcaaaattttgactatgaactgagcgagtggaagaataatttgaataataactataaaaatcttgattatttagtgtatagtgatgatataaatattacaaatacaaataatgatctaaaggaattagtatctgatagtgaagttaataatttaaaggataaatatctatggtacatgactgtaaaatacgataacactggattaatgtcaatgagtaatgtttatggtgctgatgcaaatatcgtaaaaaatacattttcaggcctaaatataagagaaatttggggttatcctcttattactcaagataatgttaaatttaattcgattaagaatgtaacttttatttatggaattcctaaagaccttaaatatacagatgaattaagcagaatgatagatgaatcacaaaataaaatgaatattgcagctgtggtaactatcctagtaggaatagtaagtattatattaatacttagtttactaattccttataaaaatggtaaagaagtgtttggaattaaatatttctcaaaaattccttttgagattaattgctttatttttggagcaggtggaattgccattggagctgtattaggccttacagtaacagaaactttaagaaatagattcgccataaatttaattggatcaagaatggacaaaaatcttgaaggctttacgatgatttcagtaaatataattatgtggatggcagctatatatattatatttgcaggtgttatgttattaaaaagcataataaattttggagtaattaaatacttaaaagaaaacttattaataattaagatttttaggtatattaaaaagctattcagtaatgtatttaattatatagggcatatagatttaaatgacaagtctaataagttcattataaaagttattggcgtaaatttgataataatgttaatctgctgtattttctggtttttgggaatagtaatagcgttaatttataatataatattattttattcaattagaaaacaatatggagatataaggaataagtttagtatacttttaaatgaagcagatagaattgctggtggtgatctagatgtagaaatagaggatgatttaggattattcaatccactaaaagatagaattgaaaaaataaaagatggtttgaaaaaagcggtaaatgaagaggttaaaagtcagagaatgaagacggaacttatttcaaatgtttctcatgatttaaaaacaccccttacttcaataataacttatactgatttattaaaaaaagataatttaactgaagaagaaagaaaatcgtatattgatacaattgataaaaaatcacaaagattgaaattcctaattgaagacttgtttgaagtaagtaaggctactagtggagatattaagctaaacttagtgaatgtagatattgtggaattaatgagacagacgcaaattgaattagatgataaaataaaggattcaaagttaatattaaaaaatagttaccctgcaagtaaagtgatattaaatcttgatagccaaaaaacctttagaatttttgaaaatctaataataaatgtagtcaaatatgctatgaagggatcaagagtatatgtagacataatagatcatgagaagaatgtagagattacaataaaaaatatgtctgcagaagagttgaactttgatccatttgacattgtagatagatttcaaagaggagataaatcaaggaatacagaaggatctggtcttggtcttgcaattgcaaagagttttgtggaagtccaaggtggaacttttaatattgaagttgacggtgatttatttaaagtaattattatatttaaaaaataagttgataataatttcttgtttaaatcatgtctatctatatggtgaattatatatatgttgcaattataaatttacatttaaaactcaagtgagcaaagtgttcaattaagaaagaaatgtataaaccaaattgcaacatatatagtgcaataatagagtgataatatataatcattctccctaattgtgccaattaagtatttgctctatatatagaattaaatcacacttgtaatattttctgaattaaaataattcatatgaaaggaacataatatgaaaattaatatctatttacattgtttattatccatacttcttggtacaataataggcatattgactatatttggacaaggtcaattaaaaggtaattggaattccctggctaatcttgggacagtttggttagttcctgccttttttataagttctattgcaaataaaaaaaggttttctgtgacatcttgttcgttatgtttaataggagaggttatgggatactattattttcattcattgataaatcaatataatttttctgttggctatttcacgttaatttggcttgggtgcgctatagttggtggtattatctttggattggcagggtatctatggtatcataaagatgaaaaatttcatgaattaggcagtgctttattatctggtgtttttttaacagatggtctaaacatgtttatacatatagatgattatagacatatgataactgtggctattgtagaaatagtttttggtttattattaataattattttagaaaaaaatatgcatcagagacttcgttgttgtatttttcttataccagttattattttaggattaataggatacacaatattatattatctaacaatataaattcatagaattagtgtaataaggtgtctttagttaatacgggatcttcctatatggaacacttaaggcaaccttgattgggtgccttttgtttttattttttacaaagttcaggttgaattttatacttctttcgcaatgaggcaaatataaaaaacaggcataatatgagatataaaatcttgcatattatagataagccaattataagttagatttatactatgaaatatatcccaactagaaactggaacaaaagtatgttattcatttcggcgagttatatgcataagttcaggttttagttgggttatctatagttaaaataggactttgaacttagaatatatggtgaaattagccatatggatagacttttatatatttatgttataatattataaatagttttagttaatggaggagataacatgtttactaaggaagagctattagtaattgaagatgctttaaaaattgcagatgctgaatatataaaattaattgatgaaaacaaaaataataaaaacagaatggtagcatttaatagaaagcaaaaaaaattatggttagttcaaaataaattaaaaaagcttatagaagaaagctaaaaataagagtagattcattatttatatattataaagatggatctacttttttataaataaacattgcacaataatactacatataataagtttgccaaaaaaaagcctgcatattataatatgtaggtatgcaattgttgtaaaatacttaattagaagttataaagaggagaaaaatatatgaataaattatttcaaattaaagatttagaattttatgaagaggattttgttgatgatataaaagattatgaagatataattgatattattgatgaattaagtgaaaatttaagttatgagattatagagattgcaggttctaatgggtgttgtgataaaacaaagaagaattatctagttgagataattggatatattgatgaaaatgatgagtttattactaaagaggagagagacgctttaggagttatggatctaaataagagattcgatttatttgttataacagtacataagtgtacagcatgtaataagtgggtaatttctatattagaataattataggataattagctgttgatacagctttttcttttataaaatgaattaatgtataagaagggaggtaaaacaattgaggaagcatagtaatagaaatactcaaagatttaaaatttgtttaatactaatttcacttatagtacagctatttgtcaatataaatacttttaatattaaagttaatgctgctgaaataaatagtaaattagatgaaatatatatatctgaatctaattacaatgaagatatgaaaagtaaagtcgaaccatatataaaaagtaaactggaatctggatatatagatggagataaggacgttaaattgtactatgaaaaatacaatatagaaaatgcaaaggctaatatagtaatatctcacggatatactgagagtttagagaagtatcatgaattaatatattattttttaaaagaagggtataatgttttcggaattgaacatagaggtcatggtagatctggcacacttggaatagctgataaaacccaagtgaatgtagaaaaatttgatcaatatgtaactgattttaaaaaatttatggatgaagttgttatgccaaataataaaggtaaaaaggtattattgtttgctcattcaatgggggaactattggaacaaaattcatagaggattacccagattattttgatgctgcggtattgagtgctcctatgcttgaagttaacactggaaatataccaaaattcttagctgatattatagtagaatttgaagttgctattagtaatggtggaaattacgttttaggtaagaaaccatatacaccagagtataaggaaaatgagattgggacaagttctttgaatcgttataaatatagtcatgatatagtagctaataacaaagaacttcaaagaggtggtgcaagttataattggacaaaagaagcctttgatacaacgaaggaaattataaaaccagaaaatgcatctaaagtaaaaattccaatattattatttcaagctgataatgatacttatgtaaaagcagaaggacaaaataaatttgcaagtagcgcaaagaattgcgaaatagaaaagatagaaaactctagacatgaaatatatttagaaaaagatgaaattcaaaaaccatatttagatgaattattagatttttatgataaggtataattttttaaacaaaaatatagaagcttgtctttgtatataaagacaagcttctattcatatcatagtatactattccatcattgctgctaattttttattaaataataagaataatattcccattataattgaagtagcagctattcctgcgaatatttgtaagtgtcctaaagtttctgtgtaaccagcaagtcttcctgctatttgattagcaacaaagctgcttagaagccatacacccattaagaaagatgcaagtttagctggcgctaattgacttaccattgaaagcccaactggtgataagcaaagttcaccaacagtatggaagaaataagttcctacaagccatatcatgttagctttaatagcagtatcttctatatttcctcctctttgcataacagcaccaaccataagtaggaaaccaagtcctaacagtattgaacctgttgccatcttttgaggaatacttaagtcaccactcttgctacaagctaatttataccataactttgaaataggtattccaagtattaatataaacaatggatttaatgattggaaccaagatactggcacttcccatccaccaactgacctatctataaaatcttgtgtgtagatagtaagtgaacttccagcttgttcaaagcctgtccagaatattatagcaaaagctgttaatattaaaataactgcagttctatgtttttcttttgtagttaatggtttagcctttgctttattatcattggaattagatttagctacacctacaggtgctttaccaatatctccaaggaatttgtttgctaatccattaaagattacttgtcctaaaatcattccaagtcctgcaactaagaaaccatatctaaatccgtagtgtataatttcgcctgcttgtgtagtagccattgttttttctgctaaagtaccacatataagaggtgctaaaaatgatccggcatttattcccatgtagaaaatagtgaaggctgaatcttttcttttatcgccatcagcatataaatgaccaaccattgttgaaatatttggtttaaagaaaccattaccgattataagtaaaaataaacctatgtatagcgcagtcatactttggtttgagaataatgttaactgtccaatagctattattattcctccaatagtgatggcttttctttgtcctaagtatctatctgagatatatccgcctgctagtggagtaaggtatacaagagatgtaaaatttgcatatatagtcattgcagataccttatctacaccaagtccacctcttataaattctgtagtcaaatacattacgagcaaagctctcataccatagtaactaaatctttcccacatttctgtaaaaaatagcatatacagacctggaggatgtttcattttgcttgattcgtttgatgaaacttctttcatcattatatcactgtcttttttaagttccataataaacctctttctttgatattttattaacataacaattttagcaacaaattcgacaacttgcaaatttttggttacaaaaatgttaaattataacctataatagtggtatttatattaaaaattaaatattctatataaaaaatttaataatagaatccccaaaaacagttgttgaattagcaatatattaaaaaatgatagcttttcataaaaaaatcatattttttgatattaattaaaaaatatgatttttttatgaatttttaaaatttgtttagtaagtttttataagaaattattgtacatagtatgtttattcttgggacagtatatattcataggattaaaaaaggtggtgaaatataattgataagaaaaattagtaattttataatatgtttttttattatttttagtattcctatagattcaaaggcatcagaagatagggattacaaaacagagatgaagcaggatattttgattcttatgttatcatatcctcaatatatagtagatgtggaaaagaagagtgatgatgaagtttacataattatgaaatcgggtaagaaaattatttatgatgataaaagggaaaaaaatcatgaagtaaaattaacaaatcctgatttacaagatatgttagagcaagattacccattagaaaaaaatacagagatcatggataaagattttgatcctggtagagctaggcattatgagttattaagcgaagtctatggaaattctaagggagcaattgaaaaaaacttagctagtttaaagtatggatatactaattatcaattcaataagcaaaataatgctaatgcgtctttagaagcagctttaaaagaattaatgcctttagcaaaatcaagatcagatataggcagtatactttaccctgccagtggaacatttaattatagagttatatctggaactgggaggctaagcccacattcatatggaatcgcaattgatcttaaaagtgataagagggattattggaagtggagttcagaaaaggctggaaaggaaagactctctgattaccctaaagaactagtggaagcatttgaaaagaataatttcgtgtggggaggaaaatgggggcattttgatatattgcattttgaatatagaccagaaataatattaaaagctagatattttgctaattggaataacaatgatgaatggttcaaaggtgttcctctaaacgaagaaactaataagtatattgaaataattaacaataaattgtaatagaatgacttaatttagaaaggggtattatagatgcgactctctaaaatcaaaaaaaaccggtcaaaatttataatcatcttagtattcattgcatttctatcattgattactagtgataaaagtagcattgtatttgctgatgctagtactgataatgaagtgaaaagtatcgtagaaaatatatttgcaataaaaaataaagctatacttagcaaagatttggattcaattaaatccttatatgctactgatactagatatggtcaatgggcatatgaatatgaagaaaaaaaggttaaatatattaataattgggcagaaaagcaaggaatacaatttgttgatatcattcccaaggtggtaattaaaaaatctaaaattggagacaataaatgttcttttagtttaatttgtaatacggagtataagtacatatatccggatcagcctgaagctataaatagttcaagaatggggacgtatcattcttttcaattaagtaagagggataacaattggataataacaaaagagtggtatacagatccatttgctgattcattaagtttagaaaatattaaagcagatgagattaagcaacatatatcgtcacagccacctagagatatttcaaatatcaatgaaaaaagaaaaggtgcaaaggaatatgcagaaaggtactgtggagcagcaacaattgaggagtatggttttaagtataataataaatatagagattttaatccagaaggtggagattgtgcaaattttgcatcacaaatactacacgaaggaggaaaatttaaggaaaatactgtgtggaactatgacaaaggaagtgcaacgggtccttgggtaaatgccggtaagtttactcattatatgattaatagtggaagagcatcggtaattgctagaggaagttatgaaaaggtatataaggcttcttataaattacttccaggagatttcatagcatacgaaaagaaaggtgatataacccatgtatcgacagttacaggagtcgattctaaaggatattccttagtaacatgccataatacagatagaaataatgtaccatgggatttaggatggagtgataaaaaaattaagttttggcttattagagttcattactaaataaaatttgccttaaggggtaattaaatgcactttaaggctttatttaaaatttaaagaacaaaatgtggtgaatgtatctataatgattaatgaaatttatctcatgacgaaagtaaaaagtttaataattacataattaatcaatattaattatgtaattaatactagtaaattcagcatcacaacaagtttattgaaataatcatattataatatatatattgcaaaaataattttccattataatcctgaaagcattgcgagaatcttagccataattgtgaactgtgaaatgtgcattgtgaattgcaacatatatagttttatataatcaaattattatagtataatacaaatcagatattaatcattaaggggggactagtaagaaatatagttatattcttactaaagtagaatgaaacaaatagtattaaataaaaaagataaaagtattgtacaggctcaattgaaactattggatgcaagttatatcgataaaattatgaaattacaagatgatgtatatgcaagattagagaataaagaattttttgcatgttcagataaaaaagaatttgaaactgccataaatgaaaaaggtatagttttaggttgtgtttcattagaggaagatgaattaattgctataggagcatatattgaatatggatatgacgagcataattatggacatgatttaaaaattcaaggggaagaacttcttaaggtgggacagattgaatcaactatggttttggatgattataggggaaataaacttcaaaagataatatgcgaatctcttgaagaaataagtaaaacagcaggaatgaattgtatttgtgcaacagtttttcctgataataaatatagtttgaatacatttaaaaaacttgggtataatgttatggaagataaattaaaatatggtggattaagaagatttgttctaatgaaagaattaaaatgacaaactttaagtattgtgaaggagtaatttatatcaatatgcattgtaagaaaattattcataaaaaagtataatttgaaattttattaacaaacttttaaaaaaagtattgatttataaattattttgcaatataatgaattccataaagcaaatgtgcttataattaataaagaaattaatttttgagaaattaaaatttatatatgcaatgatgaagaaaagtaaattcaaatagatgatttttagagagcagatgatggtggaatatctgtatgagtcttgaattgaaagaacacttcggagctattaaccgaaattttatattaaaagagtaggcttaatcgggtccataccgttaaaagtggggagtataaaataataacgttttgtacttaattgaggtgagttttttataaactaactagggtggtaccgcgagtcaatctcgtccctatgcattatgcatagggacgagatttttttgttaataaattttagttaaaataaaaatatttatttttacaaaatatctataaaaatcttatgtaaaaataatcaatatatgggaaaaggagcaataatcatgaaaagaatatttattaaagatttagcagttaacggggaagaaacagtattacttaagggatgggttcataaaattcgtgatctttcacatgtttcatttatcttacttagagataaatctgggataattcaattagtatgtactaaggaacaaattaaaggtttaagacttgaaaatgcagtagaagtaactggaatagttcgtgaaaatgaaaaggctccaaaaggcatggaaattgaagtatcagatattaaaatagcaggaactgtatattatgataaattaccatttgaaattcaaagctataaagaaaaagctgcacttgaaactcaattggattatagaacaataagtcttagaattcctaagaaaaaagcaatttttaaagttcaaaatgaaattgaagaagcatttagaatgttcttcaagagtaatgattttgaagaaatccatactccaaagataactcattccggaacagaaggtggatctgaaatgttcactgttaattactttaacagaagagctttccttgcacaaagtcctcaattctggaagcaaatgatggttggagcaggttttgaaagagtatttgaagttggttatgcatatagagcagaacttcacaacacttggagacatttaaatgagtatgttagtttagacgttgaaatgggatttataaaagacgaaactgatcttatggaaatggaagaaaactttataagatatttatataagcatttaaatgaaaaatgtgctgaagaattgaaattatttgatgtggttcttccagaagaaattaatataccaagaattccacttgctaaagcacaagaaattttattaacagaatttaataaaaaatctccagttggaaatattgataatgagggtgaggcactattccataaatatgttaaagaaaaatataatagtgactatgtattcctaacagagtatccaacagctaagagaccaatgtatgctatggaatgtgaagaaaacagagaaatgacaaagagtttcgacttaatcttcaaaggcgttgaaattacaactggtggccaaagaatacatgattatgaaatgctaaaagctaaaatgttaagattaggattaaagcttgaagattttgctttctatctagatacatttaaatatggaatgccacctcatggagggtttgcaataggtcttgaaagaattacaatgcaaatattaaaccttggaaatataagagaagcatcattattcccaagagatatgaagagattaactccttaagtataagtgagagccaaaaagtgaatgtccaaattttatatttggaaacatgaactttccctgtgggcatctatgatttgatgatggtcgcttactctgtgagtactcagcgaacgtagtgagtcgagtttccttaagtagagaacccaaatctttgatttggtgtgaatcacttactcagtgagcgaatgcgagtcgagtttcctttaaaatgaattattcaatagaaacctagaaaagtttctattgaataaagctaattagtttatgcaaagctaatgaattttaacatagtgctttaaaacagcattataatgacaaaaaatttgatgaggtgaaattaatgaaagttagtattgatgaagtaaaatatatagcaaagctttctaaattaagattttctgatgaagaagctgctaaatttgcaaaagaatttgaaaatattttagagcattttcaatatttaaatgaactagatttagatattaaagaagatatagataataaagcagaattaaagccagtagtaagaaaagatgaagttaagcaattcgaatgtaaagatttatttagaaatgttaaagatatgcaagatacttatattaaagtaccaaagattattgaatagggtggtgactagataatgcaaatgaatattaaagaaatggttagtagaattaaaagtggagaattaactagtgaagcactagttcaatcatatattgaagaaattacaaaaaacgaagggactataaatgcatttttaactcttacttgtgaagaagcattggctaaagctaaagaaatagatgctaaagtaaaagctggtgaatctctaggaagacttgcaggtattccaatagctataaaggataacatttgtacagaaggagtaaacactacttgtgcatcaaaaatgcttgaagattttgttcctccatatgatgcaactgtaataaaaaaattattagctgaagatgcaataattattggtaaaacaaacatggatgaatttgcaatgggatcttcaaatgagaactcagcatttaaaaagactttaaatccaagagatataactagagttccgggaggatcatcaggtggatcagcagcagtagttgcagcaaaattcgcaccagtgtcgttaggatctgatacaggtggatctataagacagccagcagcattttgtggtgttgtaggattaaaacctacatatggattagtttctagatttggtcttattgcttttggttcatcattagatcaaattggaccattttctaattcggtagaagacagtgcttatattttaaatataatttctggaactgatgaatatgattctacaagtataagagatttaaaagaaatagattatactgctggtcttcaagatggaattaaggggatgaaaatcggtgtcccagaagaattctttggtgaaggcttagatgaagaaattaaggaatcagtaaaaaatagtttagataaattaaaagaattaggagcagaagtcgaaacattttctcttcctataattaaggaaggattagcagcttattatataatgtcatctgctgaagcaagtactaatttagatagatatgatggaataagatatggttataaaactccaaattacacaaatctagatgaattagttgaaaacagtagaactgaaggttttggagcggaagtaaagagaagaataatgcttggaacatatgcacttgcttctggatattatgatgcttattataaaaaagcagatgcttttagaagaaaattaagatatgatcttaaaaagacttttgaaaaatatgatttgatagtaggaccagtttcacctgtattaccttttaaaattggtgaaaaaaaggctgatccattagcaatgtacttagctgatatttacactattaatgttaatttagctggaaatccagcaatatcaattccagcaggaaagagcaaagaaggcttaccaattggaattcaattaatgggtgatatgttatgcgaagaaaaaatattcaaagctgcatatagcttagaacaagctttagctattgaattataggaggggaattacgatgaattttgaaacagtaataggacttgaaatacacgcagaattaaaatcgaagacaaaaattttctgctcttgctcaactaaatttggagctgaacctaatgcaaatacatgtccaatatgcacaggggttcctggaacacttccagtacttaatgaagaagttgtaaatttagcaataaaagcaggaactgcactaggatgtacaataaacaaatataataaaatggatagaaaaaattatttttatccagatctaccaaagaattaccaaacttcacaatttgatttgccaatatgttcaggcgggcttgtagaatttgaacatgaaggaaagcaagtaaaagttagattaaatagaattcatatagaagaagatgctggaaagctagttcacgtagaaggagaaccaatttctttagtagactataacagagttggggttcctttagcagaaatagttacagaaccagatatgagaagtgttagtgaagctgtagcgtttatgaaaaagcttaaatcaattttagagtatggtgaaatttctgattgccgtatggaacaagggtcattaagatgcgatgctaatatttcattaagaccagttgggcaaaaggaatatggaactaaagtagagcttaaaaatatcaactcatttagagaacttcaaaaagctttagaaaaagaagaaagaagacaaagagaactttacacttatggagaaggtcataaggtagttcaagaaactagaagatgggatgctgcaaaaggtaaaacgatccctatgagatctaaagaagaagcagatgactatagatatgtggtagaaccagatttaccaccaattataatctatgatgaacaaattgaaacaataactaaatctttacctgaaatgccagatgaaaagaaagaaagatttttaactgcatatgaacttacagaaaaagaagttgatattttaataggtgataaaggacttgctactttctttgaaaaagttgtagctttaggtgctaagcctaaaatagcttcaaactggatattaggtgatattttaagaatattaaatgacagaaaaatagaatcagaagatatgcctcttgaagctgaaaactttgcaaagcttcttaaggtagttgaagaaggtaaaataagcaataatgtaggaagagaagttcttgatgaaatctttgatgaaaacaaagatccaatgaagatgattgaagaaaaaggacttatgcaaatcagttcatctgatgaacttgaaaaaatagttgatgaagtaattgcgaataatcctcaatcagtagaagactttaaagcaggaaagacacaaagtgctggattcttaatgggtcaagtaatgaaattgtcaaaaggaaaagcaaatcctaaggtagctaaggaattagtagataagaaacttagcgaaatttaagaaatggattgaaaaggagagcatgcattttatatgcagaagctctcctttttattttggctgatttatgaattaaataattgttaattttgctttgttttagtggaataaatatttacaaaaaataatattatatattaacttatatgttaaatactcaagctccattatattttaataaagggaggaaattatggggaatatcataaacaaatttgaaaatgaaactaagacaagggtaaacgtgatagatcttgataatttaggaaaatctcaattacaaaaagtgattattaaagatggaattttcgaagaaacagattttttaaaaaatgataactatattagttttccgacagaaatgctttgttcatctacaaaaagcaattttattaatgttcatttatgcttaaaaaatgagcttagcttagttgaaaaactgaaagatgagattataaaatcactatatgaggcttatctgattcttaataataataataataataatggtatagaaaacgataattttagtgaagaacgttttaaggaagtcttttataattctttaaacagtcaaattaataatatttccttaatcaaattttatgaagtgaatagtatacaaaatgtatttaaagatatcaattttaatgaattacttactgaattaatgagaataaattcttctgatgactttaatattgttgaagaaaaagatgagtatatctggaagagttattttagagatttcaaagatgagtttaataaacattatgacaaatggttgaaaatgatttcaaaatactatgaatacaatgaagacggtaatgaatatgtaaatgaggctcaagattatgttaataaatttttaaatagagattttcgcaagctgtgtaatgttatttatggaataaatgcttcttgtgatcttatggttgaaagggtatatattaaggtgcctgctagcaaagctaaatacctaggaatagtatttattgattgccctaaaggtgaaaatatagcaaagacaatagaaaatcgaattagtgaggattataaagagttatttctgattgtatctaaatgtagcaataatgtagaacagcttttggcattaaaagaaaacataaatactgtaactttaagtaagagagtattttatgtcttaaatgagtttaaatcatatagaaactatttatttgaaaacgacctattaggctctaattctaaagaagatttaatcgacacattaaaatattccgcagctaaaaaattaggagtcgcaggagataaagttattgtaacagaagaatttaacgatattaataaaagaacattagataaattagacacacggaatgactttttgcagttattaagaatgattagaaaagaaagcgaacgattaggtaaaactataaagattaaagcatcaaataaggaaggattaattagtatttcattaaaccaggaaagaatgattgtacaagctcttatgggaatgctttatgaaagatataatggatatctagttgagcagtggaagagaataattgctgatgaaaatgaaaaaagcgataggaagcgtaaaaattatacttacagtgagattcatacaataataagaaatcgcaaagataattataaagaatataaagttaataaatgtttaactacaagaaaagataataaaccaattgactttagtatgagaagtggcgattataatgatagtaaacgaatattaaaaatgatggttgattatggctatcaaacagtaggatttaaccctaatgaaaataaaattttagtaaatgttaatggagaaatatctaatgaagataaagaaaaattaataaagtctattaaaggaaggcttcaagaaagcgctataaactattttgaagaagctttcttaatggatatatcaagaaaaaaatttaacacaaataatttatataaagctctagaaattgaaactaatataacaattgatgatttctatagtgcatttaaagagatgttcaaaaaaattagtgataatatagttagatatgaagtttgtcttcgataacggataaaaatgctggtaaatgttaggtggcatatattgcaaaaataattcttcaatataagtctaaaaatattaccaaaattttagctgtaattgtgaaatatgaaatgtgcattgtgaattgtgaattgcagtatatatgttaaattgacttgaattttacttttgctaagcgattatattataaattatatataaaaacttcagtattaatagatcatctaaaactgaagttttttacttatgcttaaaaatataattaatctatttagattatattttaactatattgcacaatcaaaaatcatattaagttggcaaatgaatacagcaatgcatattattagtttgacaaaatatgtaaatcatatataattatgatataaaggtttaaggggatgataacgtgataaaaaactgttggaaaaaagccatagctttatcaatgatcgccacatcaataatgctattaaacccagtaggggctaaagcgtcatggaagcaagataatattggatggtggtatagtgaaggaaatctatgggctactggttggagaaaagttgatggaaattggtattatttctatcaaaatggatatatggctaaagatacgcaaataaatggttatagaatatattcaaatggagtcgcagcaggcaatcctagcgaaaaatatgaagattcaaattcttataaatggaaaattgaaaatggagaaaacaagaatatatccaataattactattatatagagaatgataaagttattggtaaaatgataaataaaaataactatttgtactatacagaaaatggacagaattttactggatggaagcaattgggtagtgcaaaaggttttaactggtattacatggagagcggaaaacgctgtttaggatggaaaagcattaatggaaattggttttatttttccgattttgatggtgactctgataccgatgttgaaaatttaagaggaaaaatggttaatacatctattttagatgcaggaaagagttaccaatttgatgattatggagctttacaaagtacagttacaagataaaaatattttaactaatgcaggaatctattataagttttattgtgtcaataatatgagattataaaatgtaatttgagatttggtaaactatactgttttatataatattattagattttcagaatgggcaattatatagcaaaaatatcgttattaaagataataacattttatatattggttatattgagtatttctaagtgcttaaataatattgtacaatacaaaaaaagaatgacttagttagggaaataagtcattcttttattattatttaaggggataaataataatgctttaactactttacaagtttaattgtatattattaatgttacatgtttgtgtcaaatttattaacttaatataaacaaaataaaaatttaaattttagcactgatatgcagacacccaattctaaaactaaatttatgtggtgacttaccggtacgccaagcaagggcgtaaaagataatgagggctaaccttcctcattattactatatagcaggtgggaatcctgcatgacaaaggccagcaaccagtcattagttagtcttgggcttattatggcgatgtaataagttaagtgtagacaaacaaggtaccaggccgcaagcgaatgctgaaactactagccacgaaattatcacaaagtcagaaaggacgataatatcggtaaattagaagtcagaacatagataatcattattgcaagaatatctgtgctttctcgtggttttaaggtgtagcatggtatacattgatatagtacgtcaacttgggaggactcattattctctgacttcagagtatggaaaacaatgattagaaatcagaggtattcaaatgataatgagtagtcggattacaccatagtactgaagaaatgagtaatgaccatggagggaagggtgtaacatattatagaccttgaaaagagaaacagaaattctcacacagaggaggaaaaaaaatgtacacaaaacttgagaggatagcagaaatagctggaaataatcctaaagagaaatttacatcactaatgcatttagttaacaaggaaatgctaattttatgccattatgaactgagcggaaataaggctacaggagtggataaggtaacaaaggaagaatatggaactaacttagagaataatattgataatctactaattagaatgaagacttttaaatatagaccgcagcctgtaaggagagtatacatagataagtctggttcaaacaagaaaagacctctaggtataccggcatatgaagacaaagttgtacaattagccattaataaaatattaaaatcaatatatgaacaagatttcattgatagttcttttgggtttagacaaaatagaagttgtcatgatgctcttaaaatcttaaatgtatatttatctgaaaagaatgtgaattatgttgtagatgctgatatcaaaggattctttgataatgttgaccacaagtggttgatgaaatttcttgaacacaggattgcagacaagaacttacttagatatataggtagatttttgaaaactggaataatggaaaacggaaagttttataaagtatatgaaggaactccacaagggggaataatatctccaacattagcaaacatttatttacattatgttttagatatatggtttaataactttatcaaaaagaagtgtaaaggacaggcttacatagtacgctatgcggatgattttgtttgctgttttcagtatgaagacgaagcgaaagctttctatgaagcattgaaaaacagattagacaaatttaacttgcaggtagctgaagataaaactaaaatattatatttcggtaagaatgcctactatgatagaaaattcaagagagcatgaaagttagaatcatataaagatagaacttttgattttctaggatttacacacttctgcagttgcagaaagaatggaagttttagagttaagaggaagactagctcaaagaaatttggagctagcataaagagattgaatgaatggttaaagaataatagaacagtgccgctcacattattaatggagaaactgacacagagactaataggatattataggtattacggaatcactgacaacagtttaagtctcgcaactttcagatatttagtaagaaaactaacttttaaatggctaaacaaaagaagtcagaaaagaagttataactggagaagttttgacactatgtttgagtgcttcaaaatacctaaagctaaaatatatgttaatattttcaacttaaaagaagatatatcatatatactgtgaattataatgtggggagccgtatgcgggaaatccgcacgtacggttctgagaggggttagggaagtgattccctagtctacttaccaaatcataaatattttgttccaaaaagctatgaaaatatcgctgaaggttctaagcagcaggttgtatccactttagcatgctccaactttaagtttgacaagctaaaatggaacaacctacagctaagaccctttaacagctcattttcaaatgttttcttcacaaatatatttatgatttctagtgaagatatgaactcaaagttttagcaacttggtgaatatgttcatctaataagtctaattattagattgtttatctatacgaaaaagtagattgtttactataagaaaagaagaactaaaaaataaaaaaataaattttaataatcattaaaaatatttatataggaataaagttggcttgataaatttttgttgcgttagttttctgaatttattcaaaaaatgattataaaaaagaacgacttatcaagggaataagccgctctaaaattagagagtattgaactaaattcctacagctaaagtataaaatgtatggagttttttatcaaaataaatcgtattccaatcaatgacatgaaaatactatatattctatgttgagttttaaaacgacatgaaaaaataaatttacacaggaatattgtagaaaaagataaaaatacatataaaaaagcaacatgaaaataagtgaagatattgttgaaagatagtacaataaggttgggtataaaattaatgattatgagagggatgagtaatcatcaaaaaagggctaagatcctcattcttaggcctttttttgatatttaacaatgtgcttgtccagattttgagaaatacagataactattttatttctaggagaaagaatacaaagcatcttatttaggagacattttcttaaacgtatattatatcttaacttaaataattcaaatctattcatgatagtacctctttttactaatttatacacataaaataaattataatctacataaaataaattttcaaaaaaaatcatactacaaataatgtcaaaatattgtataaatatacatgctattttattcagataaaatgaatatattaatctaagcaaataatatataaagagatattaaattgctagaaaatataaatttgtataaacaatatgtgtattatttaaaatagttagaaatccaaaaaacttagtttattagctttatatatcacattaaatataagttttaatgcaactagagctagttataaaactataaagattactatttaaaacttatgaaggatatttttatgaccttgatagatatatattgcaaaaataattcttcatcatgattctaaaaatattgcaagaattttatccgtaattgtgaattgtgaattgaaatatatagataatttaaagaatattagcattgaaaaattgatgaaacagatgttaaaatgtatagatgaattaaaaaagaaagtatttacttatgaggaaattattcaaattgaaaatgactaaaagatatatagtaatttattggaggtaattatcatgaacattcatgaaattttgtttggttcaagaccaaaatctattttgaaaataataaaagaaggggatttggaggaacttaaaaattttataacaaatggcggagatattaatgaaaaatataatgatactagcctgcttcattttgctatagataattgtgagaaaaattactttgaaataatacaatttctggtaaacaatggtgctgatataaatagtaatcaaagttatttgaaagaactaccattacatagaatatgtgcgagagtaagtcctaagatggacgtcattagattactgttagagaaaggatctaaagtaaatgctgaaaatatatccggaaaaactcctatcttttattgtaactttaattattcggtagagcttttaaatcttcttattaaatatggtgcagatattaaacatagagataagtatagcaatactattttgcatgatgactatttaacttgtcgtgatactgataagtttcaagaatacttaaacgaaatagtttctcttggactagatataaattcaaagaataatttaggacacacaccactatatctgtgtaaaaataaatctattgaaaatatattgatggaacgtggagcaaagagaagtgtataattaagtacttagatactatagagtagctaaacttaattatataagtttagaatcttttttatggtaacattgctaccgagtataatttataattgtggttaacatattattgcaaaacaaaattataattaaggaggtagattcaaatgtcattaaataatagcggagtacataaaaattcactatctagaaaaagaaccgactcaaatatggtaaagtcggatgttggtgcagaaattggttttcctaacaacaaagataaaggtagaggaaagacagatggaatagttggaaagaattaaaatttaaaataactttaattcttagcttagaataacaatttagaatataagaaaagataaagaatccctttgcagtaatagtttttatagcaaagggattcttttattagtttcttattagatagtcaaatgcacctaaggccgctgttgctccagatcccatggaaataattatttgcttgtatggggtattagtgcaatctccagctgcaaatactcctggtacattagtagcaccatggttatcaattataatttcacctgatttattgcgctggatagtttctcctagccaatcagtgtttggtacaagtccgatttggacaaatacaccatctaattcaacatgcttaatttctcctgtgtcacgttcaatataggtaattccatttaccttatcagtaccagaaatttctttagtctgaacattttttaagacggttatattattcaaactgtaaagacgatcttgcaaaactgaatctgctttaagttctgtcataaattcaaaaacagttacgtgactagcaactccagcaaggtcaatggcagcttcgatgcctgaattacctccaccgatgactgcaacatgtttccctttaaacaaagggccatcacagtgaggacaatatgtcacacccttattcttaaactcttcttcgccaggaacaccaacattcctccagcgggcacctgtcgaaattattacagttttactctttaaacgtgcaccattttctagctcaatctcaataaggtcttttttttctatagtcttagcgcgttgtaagtttattatatcaacgttatagtctttaacatgctcttcaagacttgcagcaagtttagggccctctgtatatttaatacttataaagttttcaatacctatggtatctaatacttgaccaccaaaacgttcaacgataattcctgtacgaatgcctttacgtgcggcataaatagcagcacttgcacctgctgggccgccgccaacaacaagcatatcgtatggatctttatctgcaaaatcttctgaaactggggcttctccgatttttgcaagaatttcttcgatagtcatgcggccacttgcaaagaattctccatttaaataaattgatggtactgcaagtatatttttactttctatctcttctttaaaaacggcaccatcaatcattgtatgagtgacatttggattaaggatgctaattaaatttagagattgaacaacttctgggcagttatgacagcttaaactaatataggtttcaaaatggtattctcctttaatgttcctaattgaatcaattgtcttctgatcaatttttggggctcttccgctaacttgtagaagagctaataccaatgaattaaattcatgtcctaaaggtattccagcaaaagctacaccagtttcttcattagtacgatttatgctaaagctgggagttcttaataactttgatttttcagcttttatttttggagacatagaaactagttcatctacgagagaaatcatagtattggatatatcatcggaatcagcactgacttttataagtacagtgccttccataagctcaagatattgagctaattgttgttttatatctttatctagtatcataggcgtacctcttagatctttcctacaagatcaaggcttggtttaagtgttgatgcgccttctttccattttgctgggcaaacttcgccaggattatttctaacatattgagcagctttaattttatttactattacagctgcatcacgcccgatattgccggcattaatttcaattgcttgaataacaccatctggatctatgataaaagtaccacgatctgcaagaccatcagactcaatcaatacatcaaagttacgagataatgtatgtgaaggatcaccaatcatagtataagttatttttttgatggcttctgaactatcgtgccatgctttatgtgtgtagtgggtatctgttgaaactgaatatacttcagcgccaagtctctttaaagtttcataattatcttgtaaatcttctaattcagtagggcatacgaatgtgaaatctgctggataaaaacaaaccacactccatttacctttgaaattttcttcagtgatatctataaattcaccgtttttgtaagctgatgctttaaattgttttacttctgttcctattaatgacataatatattacctcctaaaattcatttttatatttaaactatatttatattttattaaatattattatttaataatgataatgattatcacttaagataattataaatctaaattataatttgtcaataccattatgtaaaaattcttttaggatgaattgaactattttctttttgaaaatcagcattaaaaaaataatgtgaggacttttgctgtaatagttaactattacagcaaatcacaaaatacatatgttttaaactttttagtgattaagcttgagactaagctttacgtattttgaaataaatctaaaaaattatttccggctgatgaaagataccctgttttcgaacatattatagctatctgagttgttaatatgtcgctatcaatttctttataaattatatttgaagaacctattaattttattgcagattttggtactatggcaattccaagtccagaatttgcccaaagcagtgaagttcgtgcatcatcatttttgcaaaatacagttggttgaaaattaaaatcttggcatactttaaatatgagactttcaaatcgtctatagaatatcaagggtttattatttaattcagtaatgtttatgatttcactatcagtccagtttaagtcttttctcatagctgcaaccataggctcttttggtaaaaaaattgagtttattcctgaattgttaaatggagttcttacaatagcaatttcaattatacctttatctaataactctaataattcataggtattcccctcgtgaatttcaaaatttataaaaggatatttttcgtggaatatatttaatctgctatctaaaagtgacgctccagatgaggatacagtgcctatggataaggtaccatgatttccttgcttaaaatcttttaattcattttcagtagattttgttaaagataatatctgcttagcgcgcttataaagtataactccagcatcggtaagttttatatttcgacttcctcgttcaaccagtttaacgccgagttcatcttctaagttttttaactgatagcttaaagggggctgggccatatgaagtcttttggcagcatttgttatttgaccttcttcagcaattgcatagaaatattttaattgtttaatatccattttttatccaccttctgatatacaaaaaatgtatggcatcgatacatattatgtattttttatatagatatgtttttgttataatgataaaggaaattttgagaatgttcaataagacattacagatagggggataaatcttgaactatttattaaaattcgtaaaaccgtataaaaggcaggttacattaggtcctatatttaagttactcgaggctgtctttgaaatatcaataccaacaataatgatatttataacggataaaggaataggaacaaaaaacataaactatatatttgaaataggattaataatgctttctatggcaattttaggtgtgttatcatcttttacatgccagtattttgcatctattgcttcacaagggtttgggacggctcttagaaatgagatgtttaaaaagataggaactttttcatataatgagattgatgattttgggacgccatctcttattaatcgtgttacaaatgatgtaaatcagcttcaacttggtcttgcaatgcttataagacttgctataagggtaccgtttctttgcattggtggaattataatggctatgtatcttgatgttaaattgtcgcttataatgtatttatcgattccattctttgcttttgcaatatatcttattatgaataaatctcttcctctatataaggtggttcaaagaaaacttgataagttgtcgcttattttaagagaaaatttatctggagtaagagttataagagcattttcaagagtagaaggtgaaaagataagatttaaagaatcgaatgaggaacttgcaagcactgcaattaaggtaggaaaaatatctgcgcttatgaatccagttacaagtgtaataatgaattttgcacttatggcagtaatttggtttggcggaataagagtaaatgtaggtggaatgacaacaggacaggttatagcttatataaattatataaatatggtattatcggcgctcatagtacttgctagccttatagttacttttactaaagcagcagctagtgcagctcgtgtaaatgaggtacttagagcagaaccaagtattaagtacagtggaaattctgagtttagtaaaaatattaataaagatattccaataattaaatttgataatgtatctttttcttataaaggatctaaggaagatgcaataagtaatatttcttttgaaataaaaagaggacaaatggttgggataataggtggtacaggttcaggaaaaactactttagttaatttaatacctagattatatgatacaagcaaaggaaatgttttgctaaacggaattaatgttaaagattattacaaaaaagaaattgataacaatatagggctagttcctcaaaaagccgttttattttctggcactgtatcagaaaatataagatggggcgctcaaaatgcaagcatgagtgaagttaagaaggcagctgaaattggaatggcagcagattttatagaaaaaatgcctgaaaaatatgacacatatatatcccaaggcggagttaatttctctggtggtcaaaaacaaagacttactatagcaagagcattagtaaagaaacctgaaatattaataatggatgacagcttaagtgctcttgattatgctacagatgctgcacttagaaaagctcttaaagaaaattccagtgatacaactgtaattatggtaactcaaagaataagcactgtaaaggatgctgatttaataattgtattagatgacggaaaactcgcgggagttggaaaccatgaacaattgcttaaagagtccgaagtttatagagaaatatgtagctctcaaattacaaaggaggctatgtaaatgaaaaaaagtacattttctagattaattggttatgtttcaaaatataaagtatatatgtttgcatctctgatctttgcgctaataagtaatattcttatagcatttatgccgttaatagtaggaaggtccattgataacatagttgctaaaggtgaagttgattttgatggattaattaagacaattataatacttggagtaatatatacagtaagttcactatttacgtggctgtttactatagtagctaatattgtagcatataatacagtaaaagatcttagaaatgaagccctaaataagataagctctctgcctttaaaatactttgacaaaaatcctcatggagatattataagcagacttacaaatgatatggataatgtttcagatggattatttcaagggataacacaattttatccaggaatcataactataataagttcacttgttttaatggtaagtttaagttttaaattaactttagttatagttttaatgacacctttttgtttccttattgcttctttcattacaaagagatcaaataaaatgtttaaagagcagcaaaagactttaggtgaattaaatggttatatagaagaaatcgtgggaagccaaaaagtagtaagactttttggatatgaagaaagagctcaggagaacttttcaggaattaattcaaggctttacaagtgtgggcagcttgcgcagttttattcatcacttacaaatccagctacaagatttgtaaataatattacatatattttagttggccttgttggaggaatactttcggttttaagcgggttaagtgttggtgtgatttcaagtttcttaacctattcaactcagttttcacaaccaataaacaacattactagtgtagccactcagcttcaagcagctattgcatcttgtgaaagaatattttctattatagatgaagagccagaaaaagcagattctaaagaagttgaaaatatagagagctgtgatggaactgttgagtttgataatgtatcattttcttataataagaaagttccacttatagaaaatttcagcgttaatataaaaaaaggaagtacaatagctattgtcggaccaactggtgctggcaagaccactatagttaacttgcttatgaggttctatgatttagacaaaggtaggattactatagatggcaagagcatagatgatcttacaagaaataatctcagaagccaatttggtatggtgcttcaagatacatggctatttgaaggaactataaggcaaaatattgcttatggtaaaccaaatgctacgttagaagaagttgaaaatgcagctaaagctgcctttattcatagttttataaaaagacttcctgatggttacgatacgattataactgaatctgggggaaatctttctgaaggtcaaaagcagcttttgactatagccagagtaatgctaattgatccgccaatgcttatattagatgaagcaacaagtaatgtggatacaagaactgagctaaaaatacaaaatgcatttctttcaatgatgaaagggcgtacaagctttgttatagctcatagactttctactatccgagatgcagatataatccttgttatgaagaatggtaaaattgttgaaagagggaatcatgaggaacttgtaaataaaggtggaatttatacagaactttataatagtcagtttaagcatcagctgtaaaaagatgtttgtatatttaaaaaaatttatatgttagtataaattgtataagtaatatcatatttaataatatagcttttttatcatgagtctcttaaagttatagaggatcataaatttttaaatgcataagaggtagaaaaatgaaacgtaataatagtaatagtactaaaaatactaagggagcgagaattactatattagttattgcagttgcattacttgtaattataggaagcatagtagcagcacagaaattttcaacaggcagtaaaacggtacaagctgctagcagcacgggagaaagtagtaatgatgataaagaaaatagcgattcagttaataaggaaagtaatggcagtgtagaagatgttgcatatttagaaaagtatattgagcagcaagagaagaaccaaaagcctgatggagctgatggtaaaaaagttgcttacttaactttcgatgatggcccatcaacaacagtaacccctcaaattttagatatccttaaatctgaagatgtacatgcaacatttttccttataggaaagtatgtagataaagatgatgcaagcaaaaacttagtaaagagggaagtagcagaaggtaatgcaataggcatacattcatattcacatgactatggttacttatttccaaagggtaaaataagcttggagaattgtatgtctgattttgataaaacagataaagccttaaaaaacgttttgggagaagatttttcaacacgatcaataaggtttccaggaggacaagaaacatggagcaaaaaggatcctcaaggagcagaaaaagtggacaaagctctacatgagaaggattggcatcaaattgattggaatgcattatcaggagatgcagaaggtactcataaaaagaatgcagatgaactaacccaggaagctataaaaagtattggtaatagagaaaaggcactgattttaatgcatgatacttatggaaaagaagaaacagcgaaggctttaccaagaataatagaatatttaaaacagcaaggctatgaatttaaaataatagaataattaattattatccccatcttatttataaaataagatggggactttttgttttctaggactttatgctcagattaaacatgtggatattgtgccacttgagagtataagttatgaaaaaacactaattgagaaagttaaggttcgttaagataatcgaaatttaaaaatataaatatgatttttattacttatattgttaattttaagttatagtatagtttaaagtgcattatttaaagtgtattgtataaatagccaatgaaataagaaattggattaataaaatttagctttcatttatacctacattagtataatatgtaaattggcaaaatgaaatttatgcgagtgttctaaagagtataaattagtgattattgaaaatgtaaaattgtattttaaaataatatatatattattttgcaaaactaattcttcatcataattctaaaaatattgcaagaattttagccgtaattgtgaattgtgaaatgtgcattgtgaattgcaacatatatatgttaaagaactaagattaggagtgaagaattttgatacttagcaaagaagtagttataagacatagtaaaggattgcatgcgagagtcttggctatggttgttcataaggtaagcgaacttgagaagagatatgatttaaagttttttataatttataaagataaaaagaaaattttagccacaagtcttatgcccctggttttattgaaggtaaagcagaatgagaaaattatagtagaagttcatggagaagatccaaaagatgcgctagatgaattatgtgattttctacaaagtgattttgatttagaagataaaagtactattaatcaagttgataacataataaataataatactataacgttggagcatgtatttagtaatatacctaatggaattattgctacagatgagaaagatataatttcaatattcaatgaggaagcagaaagattattagggatatcttctggtgatgctattggtaaaaaagtatatgaaataatagaattcacaaatcttcatgaaataaatagaactggcaaatcagagttaatggtaaaagaaataataaataataaaatattacttataaatagaacaccaataataatagacaaaaaacctaaaggtgcattagcagtatttaatgatatttcaaaattagaaaaagttaaagatgaactaaaaacagtgaaagatttgaaagagaggctacaacttatattagaaacagtacaagatggtatatgtgttataaattcagatggatatataacatacgtaaataaggcatatcttagaattttgaacgaaaaagaagaggatatattaaataaaaatattagggatgtatccccagatggtgcaagaattaaagtacttaaaacaggagaaagtatcataggggctataagttataaggaaaatggtgtaataatagtttcaaatgtaaaccctatagtaattgacggagagattacaggtgttgtgtccatagttaaaaatgtaacagaagttcaaaagctttcagaaaaattaactcaggtttctgcaaaagctgattatttggaagaagagcttatgagaactaaaaaacctgattcagctttttcaaagtacataggtcatagtggtaagatattagatgcactagctacaacattaaaagcagcgaaaacagatactacagtattaataagaggagaaagtggtacaggaaaagaattaattgcagaaggaatacatttttcaagtaagaattccaaagggccttttattagagtaaattgtgcagcaataccacaaaacttattagaaagcgaactttttggatatgaaaaaggagcttttacaggagctataaaaagaaaattaggtaaatttgaattggctcaaaatggtactatacttttagatgaaataggagaaatggataagagtatgcaggccaaagttctaagagtaattcaagaaaaagaatttcaaagaattggcggagaagaaactataaaaataaatgttagaataattgctgcgactcacagaaatttagaagaaatggtaaagtcaatggaatttagagaagatttatattataggctaaatgtaattccaatatttttaccacctttaagagaaagaaagcaagatatagcgcctttattagagcattttatagataaaataggtaaaaggataaataaaagaataactatagtaacaaatgatgcaatggaatctctattagaatacaaatggccagggaatataagggagttagaaaatctggtagagagaataatggctttaaatgaaacagaagtaatagaattaagtgatcttccgtcttatatgagaaaggatataaatacagttaacaatgcaatcaaaattaaaaataataatgaaatagacatgcttattgaagcagatgaaatattaccactaaaggaatatgaaaaaattataatagaaaaagcacttaagaaatatggaagttataatgctgcagggaaggcgctaggacttactcataaaacagtagctgcaaaggcaagacaatatggaatagagaaaaaggtaacttgggaataaagaatagcaagttggtaaaaagtatcatgataaaaaagaacaacttgatattttttaccaagagatatactatttatattacaatttcctgtaaatgtttacttgcgctttaggctagaaggcttgaaaatacacacttttaagtatatttaattagtaattgaaattttggcatgagtattgctttatataaaagtacaaatataaataaaaaacaaatcaagattatctacatatattctaaaaagtttaattcatgaaagtttatcttagactattaatcagataatggaagttagataattttataatcaatgaattatattatttagaacttacatatatattgcaaaaataattcttcatcataattctaaaaatattaaaagaattttaaccgttattgtgaattgtgaaatgtgcattgtgatttgcaacatatatataaattagatataaataattttaatcataaataatatttaaatatgggaggaataattttatgaaaaaaataattaatgatgcaaatttagtacttgaggatatgttgaaaggaatggtagctgcacatccagaatatataaaaaaattagaaaatgcagatgttttagtaagagtagattcgccaatagatggaaaggttgctttagtaagtggcggaggaagtggacatgagccagctcatggaggatatgtaggaaaaggaatgcttgatgcagcagtagcaggggcagtgtttacatcacctacaccagatcaagtatatgaagcaataaaagctgtagactcaggtaaaggagttttacttgtaattaaaaattatactggggatgttatgaactttgaaatggcaaaagatatggctgaaatggaagggattaatgtaaaagctgttgtagtaaacgatgatgttgcagttgaaaatagtacttatacagcaggacgaagagggattgcaggaacagtatttatacacaaaatagcaggcgctaaagctgaaacaggagctagtcttgaagaagttacaagagttgcagagaaagtaatatcaaatgttagaagtatgggaatggctatttcatcttgtattgtaccagctgctggtaaaccaaatttcacattaggagaaaatgaaatggaaattggtatgggaattcatggggaaccaggaactcatagagaggaaataaaaacagctgatgaaattacagaacatttaatgagcaaaattctagaagatatcaaattgagtagtggagaagaagtagcagtcatggtaaatggattatcatcaacaccacttatggagttatatatagtaaataaaaaagtaaatgaaatattggaggaaaaaggggttaaaattcataaaacatttgtaggcgaatttatgacatctctcgaaatggctggattttcaataacagtgctaaaacttgatagtgaattaaaagaattattagatgcaccagctaacacaccagcatttaaagtaatataaagcaaagttttttaggtagagttcttgagattagatgaatttagtagagcgtatctaagagtgtgacggattctactaccaaagaattataatttagatgaagctttatttaatatataagcatcatctaaattagcctatataggaggaataaagatgagtattcaaggaaagaaagtaattgaaatattagagaaaataagtgaaaagatagatgaaaataaagcatatttatcggagctagacgctgcaattggagatggagaccatggacttaatatgaacaaagggtttaaggctgtaatagaaaagataaaagatgataatggaaatgatattggaggtatactaaagaagtcaggaatggcattagtatctaatgttggcggagcttcaggaccattatatggaacagcttttatgaaggcagctgtaagtgttaatggaaaatcggaaattgatattaatgatttcgcaaagatgctagatgaggctcttgaaggtataaaaatgagaggtaaaggtcaagctgatgataaaactatgatagatgctatagagccagcattaaagtcaataaaagaaggcatagatagcgggctcgaagtcaaggaaattttaaaagcagcaaaagaagctgcatataaaggtgtagagcatacaaaagaaattatagctaaaaaaggaagggcaagttatcttggagaaagaagtttaggtcaccaagatgctggggctacatcttctgcaataatattagaaacaatatatgaagctttaaattagtagtttttattttgagttacatcaaaatagtcgttgaaggagaatatatatggtaggaatagtgataatatcgcatagtaaaaatatagcagatggtgtaaaggaattagcaagtcaaatggcacctaatgtagctataggtgtggctggaggaacagcagacggaagagttggcactgatatggagaaaatatcagctgcaatagaagaagtttattcagaagatggagtaattattatttttgatttaggcagtgcttttatgaatgcagaaatggcaatagaatttctagatgaaaagatgaaggaaaaaataaagatagtagattgtccaatagttgaaggagcagtaacagcggcagttgaaagtagtataggtaaaaatattgaagaaattgaagaagcattaaaacctatgaatttagggaaaatgccttgaaataataaaatatagataaacaatatatggtttagatttatgttataagctacagaaattataaatatttctattagagatatgaacttaaatatgtttatctaataaatcaaatctttaaaatgcttagccatagttattcaaaaaagaatattttaataatatctatacagcttaagaagatagtttctataatataaatagaaatttatcttcttaattttttacaaagtatatatatttcaattcacaattgcggataaaattcttgaaatttttttagagttatgatgaaggactattcttgtaatatatatcatttttcgaggtaagacattagtgacatcatcattaatgaatataataaaacatattataaatgaaaactaaaagttattattcttgcttgggaaatctatatatagataagccaattataagttagatttgtactgtgaaatatatctcaactagaaatgggtaatatatttttgtggaatgtttcattggtaattttgatggatgtgattctttggctataagttgttccaaatgtgctagttcaaagcttgttctttgaggccagcactttgggtgcaactttatagccttagaatcacccatcagaattacctagaaactggaacaaaagtatgttattcatttcggcgagttatatgcataagttcaggttttagttgggttatctataattgaaatttataaacattgacttgaaaaattttagttgatactattaaattgagaattgttattaaaggagagggattatggaaaaatatacactaaaaattattgatataatcgatgaaacagataatacaaaaacatatttttttgaaaaaccagaaaatttaacatgggaacctggatcacatacccatattgcgcacattgggtttgatattggtgatcagcctaggaaagaatgggtaagacacatgtctattataactttgccggaggaaaataaaattgcaataacaaccagagtgccaggaagcaaatctgaatttaagaataagttagctgaattaaaaattggtgatgaagttgtattttttaagataggttcaagaatggggttaagacgtataaatagacctataatcttaatatcaatgggagttggaatagctactatgagacctctaattttatcatttattaatgataaaactaagatcccatacttatcaaatataaatatagactcatcagataaatttgtatttaaaaatcaactagataaattagtagatgaaaattataagaattattgggtaaattctaggaaagaattttatgaaatacttaataaattaatgaaagcagaggatgctatttattatgtagttggaagtgacgcatttataaaggatattattcaaagattaagattaaataacgttaaaattgatgatattgtcatagatagaaaagatgagaaaaaacaaaagtttttagaaaactaaagatggttgaaatgatccttctctaatttttattgatagaaggaacaatatttgttttattactgattaaagggattttaggaagacctgacaatcattttttctaagtctttatcggttggaatgtaatcttgcattgaaccatttagataagattaaattatgcttttagaatgagtttagctaaaatatatgaaactatatttacattaaattccaattgcgatataattatgtttgtgttgtgatagataaaataaaaattctgtgagttatttttaaactcacttggatgattttttatataaattattcatgaatttattcgaattataattatttaaagaataaaaaaggacgttcaattataataacttaccatctcgcgtaattggtacttacgttttttaagcaatataattatactagtcctaaaaatataaataatgtttcaactatatatttgttctatggttatttgaagagttttaaaattatagagattagattgagtagctcactaagaaaaagaaatatatttttcattaaatccttatcgaaacgcctttttgcatgtgtacgtttcatatgctacgcctccataatatatcgatttgagatggcataataattataacattaattggtaaaaaatacaaattagcattcatgatatgttaagcagtagtaggagaatttctactactatttttagttttaagagaaaaaatatataatatgataattaatatgatgtttcattgttaaatcaaactatgtatctataaaatatgtgaaatattactaaatattactgtgcttaattatgataggcatttttagatgttattctaattaaatttattatatattgaaattaagttactatattcaagtcttaattgaatatttatctaatagagttttgaatggaaatttattatctggatatatacattaaaataagttatagtaatttttagataattgacaattaattaacgatcatgatattatatgcatatacatataatatctgttttaataaatttatttttattaaataaataaaaaattttaacaaaatatatgtatatgcatatatttagaatggagttgattaattatgaaatcactattcgatcaaacgcaagttggtccacttaaattaaagaacagatttataagatctgcaacatatgaaggaatggcggatgaaaaaggaaatataaatgatgaactatttaaagtttacgaagatttagctaaaggaggtgtaggaactataatcactggaataacggctgtgagtgatttagaggaatttattccaggccaaatgggaatttataatgattcatttattgataatcataaaaaaattattgatgtaactcataagtacaatgctaatataatattgcaacttggagcagcaggaacacaaaccataagaaatgaagaaaaggtgattttaggcccaagtaatataacagatttgggatataaaaatacccctaaagaaatgactttagaagaaattgtttcaattcagatagattttgccaatgcagcacttagagcaaaaaaagcaggttatgatggtattcagatacatgcagctcatggatatttacttagtaagttcttaacgccttattataacagaagaacagatgagtatggtggtaatattaagaatagatctagaatgcttatagaaacgtataaaaaaatacgtgataaagtaggaaaagattatcctgttttaattaaaataaattgcgaagattttatggatcaaggtatgactttcgaagaatgtaaatatgtatgcaaaaaacttgaagagcttggcgtagatgctgttgaaattagtgggggaagtttatcttcacgcccaaatgagagttattcgagaaaaatagtgaaaggacaagctccttactatacattttatgctgaaaggataaaggaagaagttaatattccagttatttctgtaggcggaatacgtgacatttcagctctaacaaaaattcttaatgaaagctccattgattattttgcattgtccagaccattagtatgtgaaagtaatcttattaaacgttggagcgaggggaatactgagccatcaaaatgtatatcatgcggtaagtgttcaggatttggcaaaacaatctgtgtttttaacaggaaataatatcttaaacttaaaaattaatgatattatgagataaaaataatatattcttcaataaagctggttttttgaaatctgcttgtgagtatattgacaataagaattgctatagattactatatgtatattcagaggttttgacggaggtaatttatttatgtctaatttagatgatttaaagaaaattggaagttgtgtttgtagaaatttgcgcatgacaacaagggtcactactcagtattttgatcaagtttttcaagcagttggattaacagcgccacagttttcattattagcagatatagcatctcgtgaaaatgttgctgtaagtgagttggcagaggctttgctaatggatcagacaacagtaactcgcaatattgaaattttaagaaaaaagggatatgtagatgtgcgaacagatgataatgattcaagaagaaagtgcatttcaataagtgatgtcggaattaagaagctcgatgaggcaattcctgtatggaatgaagtacaatcgccaatagagaaggagataggcactgagaaatttgaagaattcttaaaaacgttagcacaaatacaaaatgttattaataactcttctaataaagtacctaagtaatgatttgatttatattcatgacttagttgtagccatatattattttacgtcttatcatttatagaaatagtttgtttaatgataaaaagtcatttaatataaaagtaatagatttatagatatagttgaaaacaagtaatagtaacctaaatctattattgataaactatattattttaaaatatatgtatatacatgttaaagctgaaatttaggttgaggatagtatttgggatgtatattaacgtgagttcgatggaaaaatttaagggataaaaaatcccatcaaaatgttttattatataagtgcgaccaaataaataaaacaaaggatgggattttatgcaaaacttattagtagaaatattttatgatgtagacaatttttgtattggatttgaaaattactgtaaaagtcatttcctaacggaaaatagcgaccgcaaatttgcaatgattaaaagtaaaactttatcattaagcgaagttatgacaataactatctactttcatttgtcaaattacagaacttttaaatcatattatattgagcatgtgtctactgttctcaaaccgtattttcctaagcttgtgagctacaataggtttgttgaattaatgcaacaatcattagttgcactactattatacatgatgaaatttagaactggcaagtgcacaggaatttcttttatcgattctacaactttgaatgtatgccataatagaagaatacactctcataaggtttttaaaggaattgcagaacgtggtaaaagttcaacgggctggttttatggttttaagcttcatcttgttgttaacgataaaggggatattctctctttttatctaactccgggaaatgtagatgatagagaaattaagactatagaaatattagcaaaagatttatttggaaaactttttggtgacaaaggttatttatctaaaaagatctccgatattttgtattccaaaggtattcagcttataacaaagataaagaaaaacatgaaaaataaattaatgttaatggaggataaaattcttcttaggaaaagagctatcattgaaacaataaatgaccaactaaaaaatatatgtcagatagagcataatcgacatagaagttttactaattttgcggttaatatagtttcaggattgatttcgtatagttttcttcctaagaaaccttctcttaagttggacaaatatctaactatggaataattggaatatcgaaccacaagattacaaggatacttttttgctttttttcataaccatatttacccataaaatattctagcttttcgaactcacgttatattaatgagggaaatgagaaagtaagagagagggcggagctggcagttaaaaaacttaatataaaaaaactaaagagtaacagtaagagagtaaattaatgtaattttattaagctggattattcctataaataatgtctattttatagcttctgtataatatataaatataacatattctaaagaatatacttagtaaagtttttgtatttcattgagtatattagaaactctcaaaattataataaagtatatttataacagaattaatgaaaagggatgattttaataatggaaatatacaataaaaatgtatataagaatagatggataatattggctgttgtggttttgcttccatttatgggcacccttgatagtacaatagttaatgtagcgcttcctgttatggtgaatatattttcagtaacgatgtcttctattcagttaatcgtaatttgctatcttataacaatagttagtacaatattactgtttggaaggctcggtgacataaaaggaaaatctatagtatttaatttagggttattggtgtttaccataggttctttgctttgtgcgttatcaaaaaattttacgtacctattagtttttagaatagttcaggcgataggagcatcggcagctatggcaaacaaccaagggataataacgcaagtatttccagcaaatgaaaggggtagggctcttggaatatcgggaacatttctagctcttggcactatgattggaccaccattaggaggtattttaatttcttacttaagttggcattatatatttctaataaatattccagtaggagtaattggaacagcaattggttttaaagtattgcctcgtaagtcaaatgaaaagaaagaagacattgattttattggtgcaataatttttggtataagtgtcgtattattattttattctcttataaatggacaaactgttggctacgataataacatgattagaattagttttattgcagctatcattctatttataatattcatacgaatagaaggaaagttaaaatatccacttctagatttatcattatttaaaaattcactttttacggttggaatattatgcaccttcatatgttatgcatcaattaacagtaataatattgtacagcctttttacctcgaaaatgttttaaaaatgactccaagctttgcgggaatgataatgatgatctcgcctgtattaataacagttatttctccttttagtggttatttatcagataaaatagggtcagaatttctaacatttttaggcttgatactaataggaattggaatgggtttaatggcgactttaaatgaaaactcaaatatataccaattaattgtatatatagtctttattgcaattggaaatggattgtttttacctcctaataattcgctagttatgtcttcagcatccagtgataagttggggattgcaggaagtataaacgcttttgtaagaaatttgggacaatcatctggtgttgctatggcaacaatgcttttatattcatttatgagtatgaaaatgggagagaaagtacttggatatatagagggcagagatgatgtctttatgtatggaatgaggtatgtatatgtttgttcggctattatttgttttgttggagtaatagtcacttatataagattaagaaagaaaaaattaaacagaaaaatatgatttcttaaatgctgattggtgtgctagataaagataatttttttgagtctgattattatgaaaaaagttaaaaataaaactttatatttatgaattgtattggtatagataaaccaactaagacctgaacttatgcatataacccgccgaaatgaataatatacttttgttccagtttctgggtaattttgatgggtgattttaaggctataaagttgcacccaaagtgctagcctcaaagaacaagcgctcacagagaaagttctgcttaccaagtgtaaaatttggagcatcacttttcgattctcactttttgaactagcacatttggaatagttcaaaggaaactcgactcacttcgttcactgagtaatttcaattaagaatcacatccatcaaaattatcaatgaaacattccatattatgacccttgtggttacaaaagtatattacacatttctggttgggatatatttcatagtataaaatctaacttataattggcttatctatacagataaacaatttaagaattaaacttattagatgaacttattaacaaagttgctaaaactttaagttcatattttcactagaaatcataaatatatttgtgtagaaaacatttgaaaatgagctgttaaaggttcttagctgtaggttgttccattttagcttgtcaaactgaaagttggagcatgctaaagtggatacaacctgctgcttagaaccttcagcgatattttcatagcttttcggaataaaaatatttatgatttcggtgaggtgtacgcataagtctaagttgtatattgtttatctatatattactgagatttaagagttgtaattaccaatgtaatttatttaactatataacctcgaactctttgtattccgtagctattcacccttcgaaaatagtcgtgatcgttttcgccaggttctcgttgtacaaatacatctaatctattatctactccaaaatacttatctgaacctttatcattaacagtaacttgtccataaccgtccaaatatatttgggtatttaaaggtattacgttatttgcaacaccgcctggagttagtggcttattttgacaggttactggaccagcactactattttctgaatcaagagatgtataaaaagttaatataaaatctttccattcaggtgtaacactcttttcttgttctttttcttcggtttccttctttttgatcaattctctttgctcaattttttcattatttatttcatctataggattttccttaaattctgttttttcattatgtgttatctctatattattatcttctacaacatctgttgctaaagcgttaaatggtgttattgtgcttacatcatatgtatcaagtattaaaataatgcttaataagcacactagcctctttactcttagcatttgtccactcccctttgttggtgctttttaatgagacataataggctctaataaattataacacaaatgtaaaatatttacaaaattcaaagagtatttatgggtatgtatatttgagataacttattgagagttaaaagaaaaataatggaaatgttgattgtggtttctagaagaaataacaaaaattcaatattgcaatatttaagttagcaatatatgaatattaagagaaagcaagtaattatataataaggaatctaataaataacaataaagaaaaattgtaaattaataatttatagataaattaattgatgtgtttgtaatatttaaccaatatatgcaataatgtttaatgtggcattaaaatatggtaatatagatatgtaattatgtataaacctttatagcaataatatggaaccaaaaaatgcagtcattagcttggctgtattttttatgcaaattaatagtggtataatagttatggttagtcgttttaatattaaaaggtattaatcagaataaacttaagaaaagctaggagtttttatttatgcatgacaatttattattaatagacggttcatctcttttatcttgctgcttttttggtaatcttccaagagaatatcgatttgctaaaactgatgaagagaaggataaatatattgaaaaattacgtcagtcacctaaaggcgagtttactaatggtgtctttacaatgatggcatcaatgcttaaagtgattaaaaatcaaaatcccactcatattgctgtggcttgggatttaactaaagaatttacctttagaaaaaaaatatattcagagtataaaggtactagaaaggatatgagaagtgagctaggaagccagtttgcattagctcaaaaagttctaaaagaaatgaatgttccagagtttgtgtttaaagagtatgaagcagatgatataataggtaccttggcaaagaaatttggaagatctatgagagttagcatttggactaaagatcaagattgtcttcaacttgttgatgataatgtaagggcatggcttataacttcaaagtgtaccgatatgtacgaaagtcttggaataaacattaaagaacttaatatacctagcggagtttttgaatttactacacagtatgtaaatcatttttatggcgtagatcctatccaaattattgatagaaaagctatagaaggtgatgcttctgacaatattccgggaataaatggagttggagaaaagtctgttataccattacttcaagaatttgaaacagtggaaggtatatatgattttatagaaaattcacctgaaaaagaaataaaaaaaatgttcaaagatcttggcatattacgttcaccgttatcaaagttagttgaggaatcaaatgaaaaaatagtcgggaaaaaagcagctttgctttgcaaacaattggccactataaagtgtgatatagaagaacttaataatataacaatagatcaattgaaactgcaaattgatgaagagggaatgaaaaacatatttactgaacttggatttacaaatttgctaaattaatggggaatatatttctagtgattaaataaaggaccgatataatttaatacatatgtaattcaaaagctagcaatagagaggttgataaatattaaaataaatgcaaaatataacattcatacataagtgatatatattaggaggaataagttatgaaattttgttggagtactttaaaagttaaaaatctagaagaatcattgaagttttatcatgagattgttggtcttaagactaataaaagatttaatgcaggatctggaatggaaattgcatttttaggagatgcagaaactaaaatagaactaatatgtgatgagaaagtaaaagaagtaagttatggcgagcatatttctcttggatttgaagttgactgcatagatgagaaaataaactttattaaggaaaaaggaatagaaattcatagtggaccatttcagccaaatcctaatactaagtttttttatgttttagatcctaatggattgaagattcaatttgtagaaaataaataatcacaaagctgttggaattctagatagatatttaataaagctgaaaatccttcaaatatgaggattttcagctttttaaacaatagtttaattaacagaaaattttcgttttaatattttaccattttcctttgctcatatgcgctgctaattctgcttttgatatttgcttaatagtccaagcactatttttagctttttcaaaagctgttacacaagtaggatctaaatttaagtctattccttctctagaaagtttaaaaattttatcagctaagttaatgatctctaaatgaatgtcattagttctatcagagtgatagattttatcagcttcttcactagttaattcgacaaatttttctttaggaactccacattttggacacttttctggagcttctactccttcacatataaatccgcacacactacatttaaataatttcttcataattattcctccctttaatcctaccattagattattaaaacatatactaagtaaatgttctcagtattattaatttgacataattggttaaaatcctcctaaaattgaaaaaaagcttaaaaatatttttgtttaaaatatagattgacgtacataatttgagtatgtaaaattaggataaataaagaatgtaatccataatagtaaggaaatgaggtgcttgaatgaaggaggatttattatattctgaaaataaaaaagataatagaatatcattattagatatatttacaaaaaacactattaaatttaagaatttaattaaatataaatttaaaaaatctagaaaagcagagaagctaacattagaatctgcaaaaaaacagtttgaagagcttaaagctaagaaagaagaattggaaaagtatgaaaatgaatttcttaagtatgatgatcaattaaaagaaatggattattgtctaataaaatctaatgatttaaactctgtaatcagctgtaaaaaagaaagtttatctcgaagattttttaaatatgagaatgtgaatattgatggtaaagcaataaatgcattaatgttttttgggaaagaaagtattattcagatagaagaaactataggccagttaaataaggatgaaatctcaatagaaaaaacatataagttaagtaaatttaggattaagaatatatgtgatttatatataagttatgaagaaaataaatatgtaataaaaaatatagaacctttagataaagaaatatatggaacattgaatgaaatcacaaacaaatatgaagagtatcacttacaaaataaagagataagagataaatttattaaagctttttctgatgccaagtatgaacttaatattgcgagcccatggatgaataactatgtggttaacaataatttgataaatatgatggaaaatttactttcaagaggaggagctatcaaaatcatatatggtatagaagaaaatagctctatttatcacattaaaaaggatagcaataatagaagtaagaatagaaatagcgatataatagcagcaaggctaaaggataaatttaaatgttatggggaaaatttcaagataaaaaaggtgaattctcataataagcttttaatttgcgacgagcaatattatatggagacaagttttaatttattatctttctcgggagaatatgacgagaattctaaggacattagagatgagggggcaacttatagcactaatatagaggttataaaagatttgagaaatagatactttagtttttagtagataattagtaaaataaaaaacaatcgatgcttaaattaaatacaaatcattaaaattaaaacggggcatgtagaaattagaaaatatacatatctcgttttgttttttaataaaaaacttattgatacttagaatttaataccaaaatttaattaatattaataacatattagtcagataataatatgttcacttagtatagaaaaagtgtacatatttaatgttgaaggttaaattatacttattcacatagttataatttattaatcgttatcctgtaggaattataacaataaattaaatcaaaaatccaactatacttgaatttaatattacctatttcgtcaaaaaaatacataagtttttaaggctatttatttaaaatatggtaataaattaataaaataaacttttacaatgaaaaacactgaaatattaaaaatattgtataaatattagcgcgatgatataataagattcaaagaataatttatataaattttcatttatttccattaaaattctgcatatttatatagaaattgggcggtgatatttataattaatagaattagaaatacagtgataggaagaaaaggttcattaaggcttttaataagtgtattgtttattacacttatggctacaactgttggtattataacctgtattatatttaaaaattggaaaagttccgtgaataacactattatgaaaattgaagacgattccaatcaggatgtttttagcgaaatacaatcgctatttagcatacctctatataacaatgaggttaaccatactcttattgaaaacaaaattatagacatgcataacaaagatcagagagatgctttttttgcaggaatagtgaaatatagtagtgatgagatttacagttttagttttggtacagaagatggtgaatactatggtgctagaaaaaatggaaatgacgagatagaaatatatagaagtacgcctgaaacaaaaggtcattctctgtattataaagtagatgaaaatttaaaacagggagattttgttaatgattatggtgattttgatcctagaacaagagactggtatataagcgctaaagaaaatggaaaaccggtattttcttccgtttataaacattttacaaaagatgatttggctttatcggcaggatatcccatttataataaagatgggaatattcaaggggtaatgggaacacatatagttctttctactcttaagcaatctttagaaagaattgctaatgataattcggctgcaatatatgtagttgaaaagaattctggatttctagttgcaaattctttgaacaaaactaactttgaaatactttcagatgggaatattagtagaactttggttaagaatattacagataaatcaattaatgatgcatatgaaaactatatcaatacttctggtacaaactttatatcggaagttaataatgagaattaccatactaaaatatttgagtataataaagatggtttagattggcttataataacatctattccagaagctgtttttacaaaagaaataaggaataatattaatatagctatagaacttactctgattgctcttattatagctgttattattcatatgaagagtactaaaatcatattaaaaccaataaatcatttgatagagacatccgataaattctctaagggtaatttatcagagagggctaaggtttttagaaatgatgaaatagggagtttgtctaaagcttttaatagcatggcggaagagctgtgttcgtttataaataatcttgaagaaaaagttaaggaaaggacaaatgaactgattattgcaaaagaagcagctgaagaagctaatatggcaaaaagtcaattcttagctaatatgagtcatgaaataagaactcctcttaatggaattgttggatttttgagtatcttagaaaaaactgacttagatagtacccagcaagattatgttgagacaatccaaacttcttctgaaacattgcttgtagttataaacgatatacttgatatttctaaaattgaagctggaagaatggaaatagagaaagttacttttgatattcgttctgtaattgaaagcactatatttctttatgatgcaaaagcgagagagaaggggcttgagcttaatatgcttataaattcggccataccaagttgtttaataggagatcctactaaaattagacaaattataagcaatttagtaagcaatgcagttaaatttacacacaacggggaagtatttgttgaggtttcggctataaaagaaacgaacactgaagtacagctttattttgaaataagagatacaggaataggtatggatgaggaggagatgggtaagctttttaaaccatttagtcaggctgattcttcatcaactagaaaatatggagggactgggttaggtcttgcaatatgcaaaaaattagttgagatgatgggtggtactataagtgtgaaaagtgtaaaaaatagagggacgaccttttgctttaatttagtactagataaatcagaacaatcagtaattcaaatgcttcctgattattctatatttaaaggtaaacgaatattagttattgatgattatgagatgaatcgttatatagcaaaagtttatcttgaagaggttgggtgtatgattgacgaggctgaaagtttagaatctgcattaaatatgcttataaataatcggaatgcatacgacgttattttgattgattaccaaatgaaggaggtaactggttttgaacttgttgaaataatgaaggaaagagacttaataaatgacattcctttgatattattaacttcagttacagcaaattctgaggcaaggatggcaaaggaaaataaattttcaggatatatttcaaaaccctataaaagaggtgatttgcttgattgtgttgcaatggtgattaaaggagatgactctaaaatatataataatgatgtttttataacaaagcaaaatattgatgaagctaaatataataaaaagataaaaatacttttagtagaggacaacgatataaacataaaattttttgttaatagtttaaaattaaatgggttgacttgtgatatttctattgatggggcaagagcgttaaaagcatgtgagaacaaggaatacgatataatttttatggattgtcagatgccagttatggatggctatgaagcaacaagaaaaattcgtttgttaggaagttataaaaatattcctataatagctatgactgcttattctatgaaagatgatgaaagtaagtgcttggaagcaggaatgattgattacttaagcaaaccttttactgttgatcaagttatggaaatgttagaaaagcatgtgaaaaatattcataatgatgatatgaatattttgagtaatttaaatgacgatggttttgagatgaatcaaggtgattattttaatgaaatagtaaaaagtcttatagaggaatcagggtttgatgagcgtttttgcacagaactgcttgaagaattttgtgagcaatcaaagacaattctgagtcaaattaaggaatgtgcaaatcaaaatgatttaaatgaatcatataaacttctacataaactaaaagggtcagcaggtactgtaagagttaatgatatggctgaattagctttgcaagcagaaaatgctgcaaaaaatgatgataaagatttattaatagaagtggtccacagcatggaaaaaacgctaaaaaaacttgtaatggaaaacgaatgagaaataaataaaaaaggtgatagaagaattgaaaaagctattagtaatttgttttgtgattagttgatacttttattaagagatacttactcatcaggaatgtcgtttatgataatattttagataaaattggtttttaatatttagctatatgtaattttgattaattacatatagctgtttttgtatttaagaataccacaagtttgacttgtggttccggaaagcttttagctataagtagaaaaaaataaacctccgttgtaaaattatagtaggtttgccgaccacaactataaagtacaaggaggtgtgtccgttaatggacattgatagtttagcacatagtaagtggaattgtaaatatcacatagtttttgcacccaaatttaggagacaagttatatatgggcagataaaagctgatataggaagaatacttagattattatgtgaaagaaagggagtagagattatagaagctaatgcatgtccagatcacatacatatgcttgtaagtataccgcctaaattaagcgtagcgcaatttatgggatatctgaagggcaagagttctttgatgatttttgataaacatgcaaacatgaaatataagtatggcaataggcaattttggtgtaaaggatattatgttgatacagtaggaagaaataagaaagtaatagaagagtatataaaaaatcaaatacaggaagatatagcttatgaacaaatgagtttgaaggaatatatcgacccgtttacgggtgagccggtaaataaaggcaagaaataaagcaccttttaggtgcagccggaaaaggttttgcggtcggcagaccatttcaacgtgcgagtagcacggccagtaacaaagccttacaggcgcagagcaagccacccgttttcacgggtggtcatgacttgtaaaggaatttattattctcaattagcatgatgatttagttttaataacaactcgtaaattttgaaagtagcccttaaaaagctaattgaattaaaatatgaactatttgtgaaaaaaatattgcaagagctctataataatagtagtattaagtaaaggtattgtatataaaaaaagtattaagaggtctaatatggaaaatgagtatatagatgaaattaaataatctatctatcaattagggaaaattaaacattaaaaacttcaaaaaatataaaagtatttaatgttattatagggtgggggaatgagaaaaatgtgtaatgagtgttatttaagaaatcgtgcagaaaaatggagacagagattagatgctatgattattaaaaagaaaggtaattttttagatgatgagataattgccttgaatcaatatgttggtgatttgatagctgagtgcatagattgtaatgcttttaagttttataaagctggcagaagaaatactgttgtaggtaataagcaacgagatgtgtattattatggggaccacaatttgtttattaatttgcataattatatagaagaaggtataagaaataatgaaaaagtatatatttctattcagaaaaatctctacaagaaattaaaaagcttacttataattaatggaatttctattgaaaaggtccaatttatatgtatagaagatatgaaaaaaattattcgtaataagagtgattcaattagttttagtgaagaaataatgttgagtgaaaataaggaatatgagagaaatagatggataattcaatcttccttgcaaaaatattttttacaacaggaagattattggaatcgatataatgaaaagtttaattcaagtattctgtgcgtacatgatgcttcactatatatacataaaattgatcatttagaattaggacatgaattgttaaataaatatcaatatcattctaaaaaagaaatttatcaagtggggatttagaatttatattttgagagcgtttaacatagtgcaaaaaagtaggcagttaattctaactgtctactttttgcgcatagaagtataaaaatatacgtttgattaatattttacggatggaagtatagcggtaagaatctcttttaatacatataaatctttctcgtgagcatgatttattatatctatcaagtcatctttattaacattaagggctctttctccgtaaactaaaaagtccaaagaaatatgtagagttgaggcaatcttaattgtagtcggaagcgacgggtgacgttgtcccaattcaatttggcttaaataagttggagatatgctaaccaattctgaaaacttttctctagttaagccattacgttctctttcggcttttatacgttttccgatatctatataattaatattattcaagtttatcattcctttttttatataactttatattttaaaggcaaataacaaaaaaagctatttgagttcgtttatgaaaattaaaacatataagtttctcacaaaaatactattaagcgcattaactaaaaatacatgtgttttttcaagaaattaaaagaataaaggaatatttaacttgggaaattctaattgaagcagaaaatctaaatgatgctgtcccaatttaagttggtctaaataagctaatttatcagcttgcttaaaaataatctttagttattccgttaggttttcttttagtttttcatagcttttttatatctgtgaaatcaataacatttaatttatttctctttttatataactgtacattcttaagtaatataacaaaagtagctatttgaattgatttataaactatttgcaaaaaaatgttgccagagaattataaaaatagtactattaagttaggtataaaatcaataaaatgctattaggagggtattatggaagaattggaagttaaaatagaatctgttagagaacatctaaacaaactagttggtgaaggagatatttgtagaaatgatgagataatttgcattagcattaaattgaatcgccttattaatcagtactacataagcaaaaaatgctagtttacataaaaagatttttagtagaattaggctttgaactaattaatttaaaattataaatttaatatgtttttataccttgcattttttattaaacttatttgttgattttaatttatatatttagataattctaatccaatataaggataaatgtcaatatatgagggggattaacttttcatactatgttcttaatatatatatttatttttacatatggttatatattagagcagaattgttaatttcttaattaggaaatgttaaaagtgggttggtgattttggaaaaaaataatatcattgaagaaaacggatacgtaatgctaaaaaataaaacagttagtaatatggaaatttaagtaaaggtgtgcttaaaaggatagggaatggttaaaaagaaggtacttatacaaatttgaggaattttacaattgagtaaaaaagaggggttatgggaggcataaagatgaaaagtacatacgcaagagatattgttcaattactagaaaaaactaactataatgaagtgatggttattagaagtaaattatcagatgaagatattgaagttataaatttttttgctgatcaatatcaaaagaatgtcatgtttgcatcgatgcatgaagctttatttaatgaaaatgataatccgttagttttaaagtattagatttattttgattgaaaaagaatatttataagagggtgtaaaattatgtggggaattttaaaacaagacaaaaaagagttaagaaaaaatttaaattatagaatttgtccttcaatttatgaggaaattgatggaataaatgagagtatagtaaaagatattaatcaggtgaacattacggatgagaaaattatatttgatatgatgaatagacgtaatatgcgtaaatataatcataagcatgatgttaaattgtatttactagtttgatttgataatcttatattaaaaatttagaggggataattctattcaacgttatatggggattaatatattgagggtagcatatgagaaatggtatttatatagggataatatattgcttgcggtgaaaatatagtgtgatcgatgaaaattattatgttttttggaaattaaataaaaagtaaagctaggcataaaatatgtctagcttttattattaattaaatgaatactaattaaacattaaaattggagtattgatttttgggtatctgttaatgaaattttataaaagtaaatttatatgtaaaaggatgaatgattatagaaaaaatcgtattacaatttgattttaataacgaccaatagatacaaaaaatattataaaaacaaggagggaaaaagaaaaaacacagaaaaaagtgattaaatggcgaaaaaaagaaaaaatattctgacataaaaagaaggcttttaagtgcattttgtagaaaagtttaattacataaaagaaatgagtttttagggaggtggttgactatgtgattaatcaggctgagatttaaatagggagattatgattggtaaaagtaatttggaattttaacgtgggaaaatatgtatgagaggtgaaaaaggaatggatttaatatgggataaaatgtggtcagttggtgttgataagatagatagacaacacaaagaattgtttaatagaattaacttgcttgtatgttctatgaagagtgcaaaaggaaaagaggagatgattacaactttgaattttcttgaagagtatgtaattagacatttcaatgatgaggaggaaattcaaaagaaaaataattatcctaattatgagattcagcataaggaacatgaaatttttaaaaataatttaaaagagttgcgaaaagtgtttgaaactacaggcgtatctacattatttgtaataagcgaacaacaaaaaatgtcatattggtggcgaaaacatgtaatagaattggataaagatataggcaagtttcttatggatgtttaaatggggtgtttatataatcttaaaggaatcagcgaagtaaaatttatagtggtttactgtggtagatttaaaattgggtataagacaatagaagttatggagggtggaagtatatggttcatttaattaatgatatagaaatcagatctaagcatacaagagaaaaatatggtatacaagttgggaaaattaagtttgatttatcaaaagaagtaagcattataaaaaaacaattgaattatgggagtgaagaatttataaatattagattagacaatgaggaaataatcattcgttataatgctatagataaaataagctacgataatgtaaagccgtatgttattgatttttatacgcttcttaataataaatttgtaggacattgtgtcttagataatgcatatatagagtatgataatgatatttcatattcaaaggtaactgaattacacttaaagacgggagttaactcgcaattaattgttaagaagcttttaatataatacatgtgaagctataaagtaaagataaaaatatttagcacatgaagtggtgatgtttaatctttatattaattgagaaaggtagagattatgaaagatttcatgaaagattttaaactatctacatttatatgtttgtttgtaattatgcttataattaatattttggttatatatattacgaattaacgcttcgttaaataaatgattaccaaaataagagcaaattttcatgattaattgtagattttgtaataaacttactgtttcataagtcaaggagatttattaggactgagtgtgaaaaaagtttaaaaggaataaaagtattaagacacttaataacgttgtttgataagtaatttgggtgggagcgatgaaggattattagatggagtgagaaagatgaaatatgaggaatattttgaacaaatatgctcaagtgatatgagtgattggtgttatgaggatgatataggagtatatttgtatagaaataatattgatataattataaaaaatgatataaagtggcttgaaaatagtgatgatacatgttatgaaaattggacaagtatttttcctaataaacatgcatataataaaaggtttattcttaaatatagggagcaaataattaaggtggtatatggagtttttgtagatgcatgtacatgttttattcctttcccggataaaaaaatgaacattacaaagcaacaatatgaaataggaaagattatcaatagttttataacttcagatgagaaatttgagtcttatttgcttaaagctaagattaatattatatcggaatgattaataaggtattttagaaacgattaattgttttcgttagattagataaaatattacataatagtttccataaaaaggcttatatttagaatataaggtgattctagcgaaataattaatgaaaaaatatataaaattaaatttaaatatatattttggaaaaatatttttttaaagtacaaaataagacaaataatatcaacgagatatgataaaatttatttatagtatttttgctagtgttttagtttgattaaaataaatacggatgaaggagaggtgggtgttttaatatgtaataataattaattattcgtcaaaaaagttgaacatttatatagaagaaagtagatgttttttatactaattgatatctcaatatatatggaaaaaagaaatttaaacgatgcttaattctaaactaatccaccagtagtgaagttttatgactgattttaatgataaatattaaaaaagatctataaatcaggaagtgtatttattctaaacagagggcaggtggaatttatgagtagttggcttgtgaatttaaattcaaaatttgcagaagaatttgatataagatttgatggatttatcgttaaagaagaagaaaaagaagaatttttaattaagatgaataagattgcacaagaagttgttgagctaacggatttaaagtttaatgaaatagatttatttgagtgtaaagaaattaaggaaaaatgtctttaataagtgtttatgctgtaatttgatcgtatttctaatggggttaataaaatgtttataaggatgatgaacttatgtcaacattaaagaactatgaaatttattgtgaattcacagatagaaaagtaaaagtaaaagaaaattatattttgacttgtggaaagatatttccaataagatgttgttatgtgttagatgatgaaagtaatataaaagaaataatacatacttgcaagcatcgtgacaatggggagtgtattttaacttaaaagcattataatacttttgatattcagggggatgagatgagatggatttggaagaaaaatacaaagatataattgaagcgtacacaagaacaattaaggaaaatgatgaatttgaggatggaagttattcctatagaaaaaacaagtttaagagtaactttgaatatggggaatttaacaaggagaatagaaagattaataagagaaataaaagtaaaaattggtcttaaagagttaccttgtctgttaatattattaattgttacatatacagtatattcgggactaaaaacatataaagctataagcagctccaagttagaacttaatttggggctactttactaaagtttcaagttaatcaaacattgattttctagcattctaatgataaaatatatttaattgtattaaatttataaatatatatgctgcaattcacaatgcacatcttacaattacgactaaaatttttacaatatttttagaattatgatgaagaattatttttgcaacgtatattatataaaaaatgttgatataggaactttaagtagttcctttttatataatcgttttaaatatttgaagttggctatgtaaccgatcaactggaactaattaatccttagtcatgattgatttgttttgtttaaagctttgaatatgagagtatgtttttattatattaatataattacaaagaagtgatcttaattataatggttagattaagatattaaaattcgcttatttatagaaaacatataataagatggtagttatctgattttttactatgtctttatcatatgtttttatttatgcgcattattatatttataaatgatttaggtgagtatgacgggtaatatttaaaatggatttagaaattatgtttctgagggtcaaaagttttgtatattcatattgaaaaatagatattttaaaataaaaattttaagggtatagatgaggggttaagtaaaattgagaaagaaatatatatatctactatttggattgataattttattagtattttctataggttattctatgagcaaaagtttctttaataaagcgcctctagttgaaaatggttttatagatctttctgattgggattttagtaaggacggaaatgtaaaattagatggatattgggaattctatcctaatgaacttttatctccttcagatattaatgacgaagtggcgttacataagttttatattaacacccctggtctatggagaaaccaaatttcaaatgatgtgatagcggataaaggaatcggaacttatagagtaaaaattaagataaataaaagtgtcttaatgtatggtataaagactacacatatacggtcagcaaacaaaatatttgtgaatggaaaagaaattggacaaagaggtaaccccaagccaagttttgaagaaggatatttttcagatattcagcggactgttgcatgttttaagccagaaggagatactttagatattattgttcaggtagcaaatctagattattttagtggggggataattcaaagtgttttcttcggagattatgaaaagatattagattactatatcatatttatcgtattagatatagctaatatattaattttagggatctttggggtgtactacattggaatttatttaaaaaatattaaacaaaagaaatttttgtatattggaagtgtatgtataatttatgctttcatctcatcgatggtgaatgaaaggatatttaataaaattttttcgtttatatcatattttggaattttgaaaataaagatagcattaataagtttgagcatatatcttgtgctcttacttatacgacaatatggtaatgattttatcactagaaaaaatacaaaaatagcaaagtatataatttttgctagtatctttaccgtcctaataacaccaatggaatttatggagttatttgaaaatataattgacacaataaatatattaatttgtgttcttgtagctttttcaattatgaaagcaatttatcataaaagatatggaggtctagggaaaaaagcaacaatacttttattttgtggggttattgcagctttaactcaatattgtatctttgtactatactattgttcaataattaagagtaacgtgattccttttattacatattttgttttcttattagtagttttagttattattttgaaacaacatataaatgcatataataaagttcaggcgataaatagtgatttaatatcattagacaagttaagaaatgaatttttaatcagcacttcccatgagtttaaaactcctttacatggaataataaatattgcccagactattttaaataaaaatgatagaaacacagcaaaggtagatgaaaatttagcgtacataatatccacaacgacaagattatcaagccttgtaaatgatataattgactttcaaagtattcagaatgaagatttgaaggttaataaaaaagcatttgatattaatggtgttgtacaggcagtgtttgatattttggcttatatgagaaaaaatgaagagatacagttaattaatagtgtaccaattggagagtattatgtttatacagatgaaaataggtttaagcaaattttgtttaaccttatagttaactctttgaaatatactgaaaatggatttattaaaattaaagctgaaatagtagaaaagaattatattaatataacaattgaagatacaggtataggcattcacgaaaagtatcatgatgaaatatttgaaagaaacattgatatagataaaaatgtttttaatggaatatttccatctggacttggactttctatttctaagttgcttgcatctagaattggtggagagttgtatctgaagtggtcagaacctgataaaggctcaatatttgttgtaaagatgcctaaagcaaacgaggatagtgacgtcattagacaagagctgaatattaaaaataatatcactacttcaaggagtgatgaaaaacttaatactaatatattttgtgaaccgactgaaaataaaagtaatggacaaaaactaaagattttacttgttgatgatgatgtatgtaatatcaaagttttgcaagaaatattttatgacagtgattatgaaactttagttgcatataacggggtaagtgccttagaattaattaaaaaacataaagatatatcgattgtattacttgatgtgatgatgcccggattatctggctatgatgtgtgtaaaaggataagagaagagtacaagctatttgagcttccgatattacttttaacagtcagaagtacaccagatgatatagcattaggttttgaagcaggtgctaatgattttttaaccaaaccttttaattttatggaattaaaagctagagtaacaactcttcaaaaaatgaggattgcagtaaaagaagctttgaaaatggagactgtatttttacaatctcaaataagacctcattttttgtataatgctttaagcgttattgtttcactgtgctatagagatgggaaaaaggcaggagagcttcttggagaattaagtaaatatttacgtttcacctttgatatagacccttacaattcgtttataagcttaaaggaagaaatatcttttgtcagatcttatgttaaattagagaaggctaggtttggggaaaggcttgaatttgaatttgatattgatgaagagtgtttgcaaaatactattccagcattagttatacagcctctagtagagaattcaatacgccatggattagtgaagcgcatttctggcggtatagtaaagatatctattaagaaaagtgattattatattaaaattgtaatacaggatgatggcatagggatagattctgaaaagctgaagggattattggatgatagtatatcgataaatagtggattgaaaaatgttaacaaaagactgataaatgagtatggacatggtataattatcgaaagtaaggtggggcaaggaactacttctacaataaatatacctctgaaattaaatatttaagagcaagggattgaagttttatgattaaggcaatggttgtagatgatgaaactttaactaatgatcatatttgtgaattaattagagatacaggtgctgaagttgaaggatatacaaatcctcatgaagctcttgataacataatgagatttaaacctgatgtgttatttttagatatagaaatgccggaaattaatggattacagtttgcagaaatggttaattcaagtggatatgaatgtgaaattgtatttattacagcttataatcaatatgcaatcaatgcatttcgggttaatgctatagattatttgttaaagccaatcataattgaagaactatatagttcaattgaacgtgtgaaaaagagaagatttttaaattctaatgtctgtccaaataaaaagataaaagtttctttatttggaggtgtatctatatatataggagatgaaaagaaacctattaggtggacgactgctaaaagtgctgaaatctttgcttttatgcttctaggaaaagatgataaggagatatctaagtggagattaatgaacgaagtatggccggataaggataaagaaaaagcagatgttaatcttagaagtacaattagtcgattaaataaaacttttagagaaaattctataaaaatttcaatcatatctactggaaatggatacaaattactaatagcagaaccagatataagaatagacgcatttgaattagaaaacttagtatttaatataactgaaataaatggatctaacctagaagggtatgaaggtattatacttgattataaatatatgcttcttgaagatttcaatagtgattggtgctattttgaaagggaaaattatcatagatattttttgaatggagcacgtaaacttgtaaaatattataaagatattaatgttgagccaattaagattttgagacttgttgagcttattattaaatatgaaccttacgatgaggaaatgagagaaaatgctttgatgcttcattataggatcggtggaataaaaaaagcagaaaaatattataatgagtactatgaaatgatggaaaatgatttgcagatggagccatcagcgtctataaaggaattatataagcatatcctaaataattaaataataatttttataataagtactatacgtgcttacaaatattggatgatattagattgttatgcattattcaaataagaaattatattataaaataaaaataaatactcaaagaaaggttaaaaatatacattatttacatctttaaccttttgttttatttaatttctaaaaataataatatcttgccacaaatttgcaacaatgtattttgtagaataaagttgtaataattctttttataaataatattttttaattaaataacacagggggtaattatgatgaatttattttcttcaacttcttcaacaaatggtctagagagggagaggctaaaacttatattggtacatgataaaactgatatatctagtgatgttttagatactataagagaggaaatactagaggtaattgatagacatgtaaaaacagacaattcatgcagaaaaatgatgttaacacaagatactgtaaatatagataattattccatattaattgctagtatacctatgaaataataaatagacgtaaattgaaaaagtaacttccgttttctaagtcaaacggaaattagttatgcaaagagtttgatataattaaaatgatatttgtccttagcatattaggaggattaattatgtcaaatgaagatttatgcaaaggaaaacaccttaagatagaagatcgacttataattgaatacgggctagatgaaaattacacattaaaggaaattgctgaaagagttaagaaggacccaactactatctctaaagagatcaagcggaatagatttctcaaatcaagtaaacgaaaagaaaataatctacaatcatgcaagcaccgaaaaagttgcacaaagacaaacttgtgtaatagtagctgtggcaatcaatgtaagaaatgtaggtttataaactgttataggacctgtaatgaatatttaatcaagaagtgcactaaacttaaccgctacccatacgtctgcaacagttgcagtacagtcactacgtgcaccgatgaaaagagctattataaagctaaagttgcagatacaaagtataaggaactattagtcacatctagagaaggacttaatataacttcgaatgagctaaaaaagatagatgaattaatttcaccacttattttgaaaggacagtcaatatctcatatttttactcatcataaagatgagctaaattgctgtgaaagaactttatattattattttgataaaaatgcttttgcagctagaaacattgatttgcctagaaaagtgaaatataaacctagaaagaaatctacacttcctgtaattaaagaatcaactgatagagttggaagaaccttcaatgactttgttaagtttattgaggataatcctagtattccaataatagagatggatactgtacacggcacacgaagtggcaaagtgcttctcacttttatgtttagaaactgttcattaatgctagctttcattatagataactgtagccagacggctgttaaagacaccttagacaagctatatgaggttttaggccatgaagtatttaaacgtagctttcctgttattctaacagataacggctcagaatttaaaaacccagaagctttagaattagatactgaaggaaatcaaagaactaaaatattctactgtaaccctatggcttcttatcagaagccgcacgtagaaaaaaatcatgaatatataaggtatataatacccaaaggaaaatcttttgatgataggaatcaagaggatattaccttaatgatgaaccatattaatagtacagcaagagctagtttaaacggaaatacaccattcaaactagcccaaatgttgttagatgtctcgatgttagacaagttatcattaaaacatatccatgcagatgaggtacatctaaaacctgcactatttaataaataatatatcaaaaatttagggcaagtatcagcggaacttaatcatgcaaagttgaagcaaacggaagttagttttgcaaggcgatttccgtaggcttattaagcctgcttataaaccctaaaaaaagattatattatgaaaattatagcttattttaagtctttttactactaaatttagttctaaaaactgactttacccttgcagttacaatagctcacgctaaaacggaagttagtttttcatttaaccaataataaatagaatatgtaaagcgtatgataatattacagatataaaaaatttattaaaaagaaaatatatttgagttttgcacgcactgcaaacagatagtaaattgtatgttgcatctttcttaatttcgtacttgaacaataattaatattatataagtgtaagtgattactataagaaaatagataaacacttacacttattttttaatagtatgttggaagcgatggcaaagtggtatataatgatgaaaaagattatttaatgttttaaattgagagggaggaataagaatgtcttatttatttgtagagtatccaaaatgtacaacttgcaaacgagcaaaaaagtggctcgatgaacatcaagttgaatatgaggatagacatatagttgataacaatcctaaaatagaagaacttcaagaatggataaagaaaagtggcttgccaattaaaaagttttttaacacaagtggaactttatataaagagatgaagttgagtcaaaagcttaaagaactttcagaagaagaacaagtaaagcttttatcaacaaacggaatgttggttaagcgccctattgtagttggagatgactttgtgcttgttggttttcgagatgagagtttatgggaagagtcacttttgagagtctagattaaccttgatataatgagtcttaactgaggtagatgttgtatacataaataaatgaaggttagataagaacctagtatgagaaataattaattagtatgcaactataattaataaaaaaatataagttagtgattaagtaatatgagaaagagatatttgaattgaaatagatatctctttcttttttatttggagaaatcatcaaagataaattacttatggagattgaagaataatttattaatatgctatataattatttaagccaatatgtaatatgttaaaatacatcaataaaaatgattaaatttatcactaaaattactatttaaaatgtgctattctatatatcataaagcaaaaggcaaaattttcataaagcgcataataaaatatattgattaatgccaaaatagatataattagtcttttaatagacgtatgtaagcgcatttataaaattgctatattggggagtgatagggatggaaaattttcaaaaatataaaagaatgtattttatgccaccaaaagtgacatacgattgggtgaaaaaagattatatagataaagcgcctagatggtgtagtgttgatttacgtgatggaaatcaatcattaattgaacctatgagtttagaagaaaagttagaattttttaatatgttagtaaaaataggttttaaagaaattgaagtaggatttccagctgcttctgaaactgaataccaatttataagaacattaattgaggaaaacatgattcctaatgatgtctcaattcaggtattaactcaagctagagaacatatcattagaaagacttttcaggcggttaaaggggccccgcatgcagtaattcatttatataactcaacttcagttgcacaaagagagcaggtctttggcaaatctaaggatgaaattaagcagcttgctgtaaatggggcaaaacttctaaaagaaatagcagaagaagaaaaaggaaactattcatttcaatatagcccagaaagttttccgggaacagaagtagattatgcggtagaagtatgtaatgctgttttagatgtttggaagccgacaaaagaagagaaggcaatcattaatattcctacaacagttgaaaatgcgatgcctcatgtatttgcctgccaagttgaatatattcacaaaaacttaaagtatagggatgctgtaactttatgcttacatccacataatgatagaggaagtggagtgagtgatgcagagtttggtatacttgcaggcgcagatagaatagaaggaactctatttggtaatggtgagaggacagggaatttagatattgttacagttgctatgaatctttattctcatggtgtagatcctaatttgaattttagaaatatgcctgaaatagttgaaaattatgaaagattaaccaatatgcaagtaggtatgcgtcaaccatatgctggtgaattagtatttactgccttttcaggttctcatcaggatgctatttcgaagggaataaagtggcgtgaaaataaagagtgtacgtattgggaagttccgtatttacctattgatccaatggatgttgggcgtcaatatgattcagatgttatccgcattaacagtcaatcaggtaaaggtggagtggcttatatattacaaaagaatttcggaatatcacttccaaaacagatgcaggaagcatttgggtatacagtaaaggatgtatcagataaggctcatagagaattaacaccagaaggaatttataaaattttagaagagaagtttattcgtaactcccatgtatttcaaattccagaatgtcatttcatacaaggagaggagatggcagccgatactacaatttgtcatggtgggaaaatacaatgtataacagcgcatggaaatggaagattagatgcagttagtaatgcaattaaacagtattttgatattgattatgaattagatgtgtatgaagaacattcattaacaagagggtcatcatcgaaagctgttacttatgtgggaattaaatgtcataacaagctttattggggagtaggaatagaaaatgatattattaattcatcaattgcagctttagcagtagcagttaatcaattagaagagattaagaatatgaaaagatcagatagtagaatgacagaggtattgaattatattcaatcaaactataagacggtcacattagaaaagctttcagaaactttttacttatctaagccttacttatcgaaatatattaaagaaagtacaaatagtacttttgtggatatagtaaaacaaattagaatggataaagctaagagcttacttaaaggaagtgggatgacagtagaaaatattgcagagcaagttggttatgaaaatgtagagcattttataagactgtttaagaaagcatatggaataactccagtggaatttagaaataatatacctaagcgaatggagcaataaaataacaaatttgtcttttgtaaaaagatttaatgaaaaaatatagactaatatgtcatactatggtatattatatacataacaaatgatttgaaaaaactaaagatttaaataaactaaagatatttcgaaaagaggtgactatagacatggttatctcttttcttatttataaagcgagaggcaaaataattataaaacttagatgaattcttcttttaacactataaatacattaaaagtatttgtcgaaaaaaacctgataatcaatatcaaaaaatatagattattttttaatattgtgttaatatgaatttatacaaaagatatccaaaccccactcttaatctcccctaaattttatataagatacagccataacttggctgtatttttttgcgtatttagttaagagatatgttaatgcactataggtcacctaatcaattagaaagtgactttacaacaattagatcatatttacaatatatgctataatttagcctagtagtagatataaatttaaggatgtctttttaatgattatataaatgcttacactcggaggaaagaaaatggagattataaaatcaatattatattttatattggctggaatatttgaaattggaggtggatatcttatatggatatggttacgcgatggaaaaagctatttatatggagttataggggcggtcatattaattttatatggaataattcctacgttacagccttcaaatgctaattttggtaaggtatatgcagcatatggaggaatatttattgtaatgtcaattttatggggatggaaaattgataatatagtacctgataagtttgagttaattggtggatgtatagctctagtaggtgttattgtaattatgtatgcaccaagaggatagtaaagtgtgttatgataaaaatccatatataaaaatgaagtgtgaagagtttgaaaaagctttaaaaatagaaatactttaagaaaaatgtaatggatgattcttactaatatttgaattaatataaaattatagaaggaaaaaataaatttttatataattatttatattaaggggataagttaatgaataaaaatgtagatataatattagaaataataaaaaatatgccatgtgaaaaaaatattgaaggcgttgatgttcctaaatctttgggatatgagcagataggaatgaatattgatgaatttgatgaagcaatcaagtacatacaagataatgatttactgagggaaatagttcctatattaaaagataataagatagtactaataaatataatgtgaaatcagactaaatttctagaaaggcggctaatatgactagtaaagaaatagaatttgttgatttaactaaccaacagtatgaagctttgattaaaatgcaaatggaatcatataaaaaaatattggatttttgcagagaaaatataaatgactcagagaaagttgaacttatagataagaacatattaaaaatagatgaaaaaataataacaaaattagaggaaatgagagtttacaataaaatatttatagagacagttaagtaagattcaatatttttagaggaatttctccttttttgtataattattattatggaaagaggtgaggatatggaatttaatcagaagtcatggattgaaaactatgtacatagcttatgcccgaaaaaaattagtaaagaaaatgtagataaagagataaataacataataactttaattaatgagttatttagtagtagaaatgcagacaagcatgttgaatttgtcccggatgaaaattctataatatttccaggtagaaaagcaaatatttttataagatatagtatagatggaaatggtaatgaattgaaaatatcaaaacataaaaatcgtgaattaagcagtagtattgaaaaagcaatattaataagttgcaaaggtgaagaatatgtggtaaaagatgaaccttcgataacaatggacgaaatgtcatttgaaggtttgaaagattctattaattatgcattaagcaaaatattaaactaaacatctgtgtaagagaaccctagatagggttctcttgttatatatttttatttttttagtaagatttcaagaaaacattttcaactgacaaaaaactgacaaaatttaatggtaatatatatattagaaagtgtaaatgttgtcaataatgtattatagataatataaaaaatttttatattgcatgataatgtttacaaaaagtcataaagttttaattgtttttgtataaaaatcacaagaatttaatattatcatatatttaaaagaggtgagaacaacatggggaatataattaaaattaatatgtacgctgaaatgaacaaaaaaaagaatgttaagctagatctaaaaacagtagaagaagtcattttagaatataataaatggctaaagaaaaacaacagagaggataaaatagagacttatgaaaagtttttacaagtataattatctttaaaggtagattgagtgataatgcttaatttacctttttttatttttatgtagaaatatagataagcctactataatctatacttatgcgtatacatcaccgaaatcataaatattttgattccgaaaagctatgaaaatatcgctgaaggttctaagcagcaggttgtatccactttagcatgctccaactttcctagggaagctcgactcattacattcgctgaggaagttcgagaatccaaaataagattttggactctcacttcacaagctaaaatggaacaacctacagcaaagaacctttaacagctcattttcaaatgttttcttcatattatgacccttgtggttacaaatatatttatgatttctagtgaagatatgaacttaaagttttagtaaatttgtaaatacattcatctaataagttgaattcttaaattggatatctataacagcgcagttaaatctgatatatttaagatttttggagtttattgtgagttattgtaaagaaaactctattttatgttaaaatataagtagattttaaaagtgtattttggtaaagggagagaaaggtattaatatagaataaaaaataattattaaaatatcagtaaataattatagagatttagtaaataagtgatgaaaatgaaaaaatgtatctaagaaattgtattgagatattaaaagattgggtaaatttatgtgaagataaagaattttactaaagaatggaggtacgttatggagaataaagaactattaattgaaaactcacataagagaagcgaaagttatggagttgaaaaaaattcagatcattcaaataagattcttactggtgaagaactagaaaatatattaactattaataaagaattaatagaagtatctaaaatatacatagatatggtattttcagcagttatggataatgaatttattatagtattaacagataaaaatgggtgcattctatatattaaaggagcagaagaaaataatagtaagcttggggggaataatcttgaagttggggcttatatggacgagcaaaatataggaactaatgcaatggggacagcaattaaagaagacaggtgtattcagataactgcaactgagcattatataaaaaggttccacaatttaacatgctctgctgcacctattcataatacaaagggagaaattattggaacattgaacttaactggtagaagagatatgaagcatccacatactttaggtttagttgtttttggtgtaaaggcaatcgaaaatgaattggacaagaagggtataagggatatattgaatcaaacctataactatatggagagtgtcatagataatgttgataaaggcatcatgatagtaaataaagagtataaagtaataaatataaataaacttggagtagagatatttaatatagataaggatttgataataagtcaagatatacattatattttgcctgatttgggaaatgtaatagaagaacttgaaaaccataatggtgatattataaaggagctaaaattaaagcatacaagcagacataaaataaagttagtttttaaaggtcttaaacataaagataatattataggtatggttgtaacaataagctatgaaaaagaaggaaaagacaacaaaaatgcaacaggggcgttttttacttttaatgatataattggagatagtgcagcaattgttaatgtgataactaactgtaaggttattgcaaatagtccttcaactgttctaattcaaggggaaagtggaaccggtaaagaaatattagcacaggctatgcataattatagtgtgcgaagaagaaataaatttgttgcaataaattgtggagctataccagctaatataatagaaagtgaattgtttgggtatgaggatgggacctttacaggaggaaaaagagggggaaatccaggtaaatttgagattgcaagcggaggtactttgtttttggacgaaattggggaaatgccacttgatgcacaggttaagctgttaagagtgcttcaaaatggaagagttacaagacttggtggaagcaaagagattcctatagatgtaagagttatagcagctactaataaaaatttaaaaagagaagttcaaaaagggaattttagagaagatttgtactatagattatgtgtaattccaatcactttaccgccgttaagagagagaaaaggcgatgtgaaaatgcttattgacttcttcttaagaattaaatcctttcagttgaataaatcaataccggagcttgataaaagtttatataataagttattagactatgattggcctggaaatataagagagcttgaaaattatattgagaatatagtaaatttggatggacgatcatcttttaatttatgggaatttgaagataatcaaagttttgagacagataaaacatatgataggaaaatattaaaagatggttttttaaataaagagatatgggaagacgatcagacaaatgggttacttaagaatgttaatactgaaaagactgagtatatggtaaatactttaaatctagaagaactagaaatgaaggcaattcatgaagctgtaagaataaataatcataatatgacaaaagcggctaaaactttaggtataagtagaaacactctatatctaaaattaaaaaaacggaaataaattataaagcatgtcctaaaatattacgctgtattaaatttatgctgtattgttttaggacatatctttgttaaaaattatttatataaatgagtatatgcttaacaattaatctatgtataatttatttttatatatttaataacttaatttaaaccctttaaatataatatttctcaggaattacgagttttttgttagaaaagtactcttatattttgacattttattatcataaatatagaatatattgataaaataatcacaagttggcatgaatattgctttaataatttatgtggtcaaaaatagacatattaacttattattttacaactatgcaaaataataaatgagcaaattttaggaggaaatatttatggcacgttttactttaccaagagacatttatcatggagaaggagcacttgaggcacttaaaactttaaagggtaagaaagctttcgtagtagttggtggcggatcaatgaaaagatttggatttcttaaacaagttgaagattatttaaaagaagcaggaatggaagtagaattatttgaaggtgttgaaccagatccatcagtggaaacagtaatgaaaggcgcagaagctatgagaaactttgagcctgattggatagttgcaatcggtggaggatcaccaattgatgctgcaaaggctatgtggatattctacgaatacccagattttacttttgaacaagcagttgttccatttggactaccagaccttagacaaaaggctaagtttgtagctattccatcaacaagcggtacagctacagaagttacagcattctcagttatcacaaattattcagaaaagattaaatatcctttagctgattttaacataactccagatatagcaatagttgatccagcacttgctcaaactatgccaaaaactttaacagctcatactggaatggatgcattaactcacgctatagaagcatacactgcatcacttcaatcaaatttctcagatccattagcaattaaagctatagaaatggttcaagaaaatttattgaaatcatttgaaggagataaagaagcaagaaatctaatgcatgaggctcaatgtttagctggaatggcattttctaatgcattacttggaatagttcactcaatggctcataaggttggtgctgtattccatattcctcatggatgtgcaaatgctatatttttaccatatgtaattgagtataatagaacaaaatgcgaaaatagatatggagatattgcgagagcattaaaattaaaaggaaataatgatgcagagttaactgattcgttaatcgaattaattaatggattaaatgataaattagaaattcctcactcaatgaaagagtatggagttactgaagaagattttaaagctaatctttcatttatagctcataacgcagtattagatgcatgtacaggatcaaatcctagagaaatagatgatgctacaatggaaaaattatttgaatgcacatactatggaactaaagttaatttataaaataaattaaggcaatttttttatttcataatcttatagagataaagtaagttgtttcacattaaaaatcatgtaacttttaaaaagttattaaagtaaataattgaataattactaaaagaatcgttacaacattgataaaacaacaatgactctccacctcagggagtctttgttgttgatatggaaacaaggatgaaaatgccaatcatcggatatatcttatgtttagaagctgtaatcctatcgcttctttaagtgatatgtaacagttgtatgatcagaaataaattttagctaagattcagatagggatcaagctctatctaagcaagtttaatttgaaattatcaatagaatttataagtgtagggggtactaagagtgtacaaaattgttaacaaaagagaacttaccaataacatattcttaatggatatagaagcgcctagagttgctaaatcagcaaaaccaggtcaatttataattataaaaaatgatgaaaaaggagaaagaatacctttaacaattgcagattataatgcggaaaaaggtacagtggctatagtttttgcagctataggaaaaggaactaagcagttagcggcatttaatgttggagattatgtttcggattttgtgggtccattaggtgtaccaagtgaatttattcatgaagatctagaagaattgaaaaagaaaaatattatctttattgcaggaggcgtaggagcagctccagtttatcctcaagttaagtggatgcacgaacatgggatagctgtagatgttattttaggaagcagaaataaagatttatcaatatatgaagaagaattaaaggcagttgctggaaatctttacgtgacaacagatgatggttcgtacggttttaaaggaactggttcagatatgcttaaggaattagttaataatcagggtaagaaatatgaccaagctgttattattggaccaatgataatgatgaaatttacttcaatgttaactaaagaattaaatattccaactgtagtaagtttaaatcctataatggttgatggtactggaatgtgtggtgcttgtagagttactgttggaggaaaggttaaatttgcatgtgttgatggtcctgaatttgatggacatttagtagattacgatgaatcaatgagaagacaagctatgtataaaacagaagaaggaagagaattattaaaacatgaagaaggaaacactcataaccatggcggttgtggatgcaaggaggataagtaatagagatgaacgatagaatgaaaagaacacctgttactgaacaagctccagaagtaagagcaaaaaactttaaggaagtttgtttaggatataatgaagatgatgcactaaaagaagcaaatagatgtttaaattgtaaaaatcctaaatgtgttgagggatgtccagtatcaatcaacattccaggatttatatcaaaagctaaaactggagattttgaaggcgctgctaaagaaatagcaaaatacagtgcacttccagcggtttgtggaagagtatgtccacaagaaaaccaatgtgaaggtaactgtgtacttggaattaaaggtgaagctgtagctataggtaaattagaaatgtttaccgcagactggtcaagaaaaaataaagtagatttatcacaaacagaaccttctaaggggaagaaagttgcggtaattggaagtggtcctgctggtcttacttgtgcaggagacctagctaaaaaaggttatgatgtaactatatttgaagcactacatgaagctggtggagttctagtttatggaatacctgaatttagattaccaaaggatgatgttgttaaagcagaaattgaaaacataaagaagcttggagtaacaattgaaactaatgtaattgtaggaagaacaataactatagatcaattaattgaagatgaaaaatttgaagctgtattcattggatcaggagcaggtcttccaaagtttatgggaataccaggagaaaatgcaaatggcgtattttcagctaatgagtttttaacaagagtaaacttaatgaaagcatttaaagaagaatatgatactccagttaaagcaggtaaaaaagttgctatagttggcggaggaaatgttgctatggatgcagcaagaactgctttaagacttggtgcagaagctcatatagtatatagaagaggtgaatcagagcttccagcaagagcagaagaagtgcatcatgctaaagaagaaggagtaatatttgatgttttaactaatccaacagaaatcttaacagatgaaaatggatgggttaaaggaatgaaatgcgttaaaatggaacttggagaaccagatgcttcaggaagaagaaaacctgtagttaaggaaaattcagagtttgtattagacgttgatacagtaataatgtcacttggaacttcaccaaatccattaatttcatcaactactaaaggtttagaaatcaatggtagagcttgtttagttgccaatgaagatggattaacaactaaagaaggtgtttatgctggtggagatgcagttactggtgctgcaactgttattttagcaatgggagcgggaaagaaagctgctgctgcaatagatgaatatttaagtagatagcatttaacatattatatattaagaagattagttacagggaaggatagatgtaactaatctttttttgtttataattttagacgatatttaacaaaaattattttttagaataaaaataatgtctcaataaaaagaggaaataatcttaaaatttccttaaaaatctctaatttagtattcctaatgatattatttgttgattttattatagattaatgataatatttcatatatatgaaataagtacatattaatgtattatattacaattggaagctatgaagaattctttctaagtgggcactttaagagtttggagctagttgtgcaaccgaccaattaagattaattaattattttattagttagttttaattggttttttatatgaaaaaatttatttatatataaatacttatatatcttaagcttaagtatgacgtagactcattgagataagattttaattttcatgaaccaaattatactacattaagggttggattaagaggtatacaagtattaatgaaggggatgagactgttatggatatttttgtagctagacagcctatatttaacaggaaaaatgaagttgttgcatatgaacttctatttagaaatggacaaaacaatttctataacaatgctaatggcgatgaagcaactttaaaggttatagcgaatacattttatacatttgatttcaaagatattactgataacaagaaggcatttataaactttactgaagaattgataaagaaagaaatagcaaccatacttcctaaagaatatgttgttatagaaattttagaaaatatagaaccaaatgatgaaattgttgatgcgtgtaagagacttaagaaaagagggtttatattagcattagatgattttgtattccatactaaatatattaaattaatagaactagctgatattataaagatagattttagaatcactacagggggcgaaagaaagaaagtatttgaactaaaaaaaataaataataaaataaagtttttggctgaaaaagtagagaacaaagacgaatacgatgaggctttgaagctagggtattcatattttcaaggatattattttagtaaaccaatagtactttccagaaaaaacattccgactaacaaagatacagcaataaaaattctaaagttaattaataaagacgattttgattttaataaattagaagaactaataataaaggacttaggattgtcatataaaataattaaattgataaattcttctgcatattgcctaaagaatgaagtaagatctataagatatgctattgcacttttgggaagaaaagagattataaagtggctatatgtagtgctgctaaatgatctaaaggaaaataacacagatgaacttataaaagtctcattgcagagagcgaagttatgtgaattaatatgtaatatgagtgaatataaaaataatgtttattcagcttatatggtaggattattttcagttatggatgcaattttaaattgttcaattgaagtgatcttaaaagaattatatatagatgatgaaataaaggaaggactaattgaaaaagataatttcttgaataaaatattgaaattggctattaactatgaaaaaggtcagtgggaaaatgttgagttttatactaaggaaataggtgtcaatgataataagcttgcagaagcctatatagatgctataaaatgggcagatgatgttgtgagttaaaaaaataagaaactagaacgtgtctagtttcttactctaattggtaaaaaaagaaaatactatatcaaaactctaggaaaaatttcaatataagtaaattgtatatttacattaacattatacgacataaactgttttaattcaacaataaaaatataaaaaaggtgcaaatggcaaaaaaaaataatattatattatttttcattgggagagtattaaattttaggataaatattctaaaattgctaatgggtataagtaattaaataaaaaaaatgataggagttttagaaactgatttttaatataaaaagagatagtagttaaattaataaatgctatctcttttggtgtagttgaaaagtaatattttcattaataattatttgcaaaatttaaagatattatacataaaaataaaaaaagtaatgacaaaataataatatttcgagatttactaagtactcctttcagttataaaggaataataaaatttatgattgataacaagaataatatttactctatgagtcatgatcagctaataaaatggaaaattgaattatataatgtatattacaaaacatgaacctataaaatttaaatatacaggttataggtaatatattttgcttttctaaattatttgccatatatactttatctatggtttaaaataattttcgaaaatatactttatcagtagaaaaatttatgttttatgtcagaaaagtatatttattaacgaataatatattgagtgtgtaaaaattgattcccatataccccttaatatgcaattacataacactcctatattttactatacctactaacagtaaatcccctgtaaaatgatgataaatttacaggggatttttaactttatttaaagtataatatgctaaagagtagtaatttacaatgcattgatgtttcaatcacaatattaatttcatctgattattatataacaaatattattcagtagttaatatttattggattttacaccccattattaatacgaggtgaaattaatgaaaataaaagtgataaatagttacccagcttgtatatgggaagaagatattattaaagcaattcacgatttatgtcttgaagaacttcaagaaaagctggagaaatataaatctgataactcgagcaaagagattgctaattgccatatttcaaaaagagagttttgttgcaagaaacaagtatttatcgaaatgacagcaatgtttgatagcgttgatacaataaattagaaaaaatattgatttagtgaatgatactaaatgaaaaacattctcctattaaaaaatgaggagattgttttttatttttggaaaattgtaatgaagttaagagtgtggaaaagttacacagaaatctattcaacaagattgaaaatgactggcaagtgcaaaataaatccatttttcttgtggaacttttatcacatctattttaaatataaatacaatcaaataacatgagaataattatcagacttatgtgaattggatgggtattatggtataatttagagtagaagtaaattgcttattagtttttgatatttatgtaaaaataagtggataagcttagtagtttatagaatggttatagaattaggtattgggattaaacatgataacttttatatcttaaaggacgaagggaaggataaatacaatgtttaagaaaatgaaaatatcccaaaaattagtaggaagtagtgtgatatgtactgtattcttagttttagtcggcatagctggtctatttagcatgaacaaactaaatataaatacagataaaatttataataataatttaatgagacttcagaagttatatgtagtaaaaagtaatactaacttaggactatctgatatggaacatattattaatagtaattttaaaaatgatatagatgaggcacaaaaagatttagcagatttatctgatttaaataataaaacttttgaagaaattgaaaaaataccttattctagtgaaaaagaagaagctgattataaaaaagttaaagatgcgttaattaggtatagggatataagaacaaagataataaaggatgtaactgacaataattatgagggagctattgcactatataattcggagtatgttactttaagagaagaaatagctgatgatataaatgttataataaatgaaaatattgatgcggccaaagaaacatcggaatcaagtaacgcagtttttaaaaattcgtttaaattccttacaatatttgttgttatttcagcattgatattagccatattaagtggtggattagcaatttggttaagaaagagaataaacagtatagttaattttgctaatggtctagcggaaggagatcttactgagaaaataaatataaatgcatatgatgaaataggtaatatgtcaaaagcattgaatattgctgtattagacgtgaaaaatcttattatggaacttactaatcgtatgaaaaatgttagaatttcaaatgaagatctaacttcaacaatggaagaaatgtctgcaactatgaataatattaaaactgtgacccatgaaattgctgatgcaagcatgaatttaagtgcggcaactcaagatgttagttcatatacaatggaaatagaaaagctgacagatgaactcagcagaaatgctgaaaaaagagaattagattcagatgaaattatgaaaagagcggtaaatgtaaaagaaaaagcggaagcatcatctaataatgcaataagcctatataatgaaaaagaaattaagattaaaaaagcaattgaggatataaagattgttaaagaaatagaaaaaatggcagaagctattggacaaatagctgaacaaactaatcttctagcacttaatgcatctatagaggctgctaatgctggggatgcaggtcgcggatttgctgtagttgcagaggaagttagaaaattagctgagaagtcatcagaaacagttatcgatataaagaaaaatataggtacagttggaaatgttattgaaaactttactaataatactaaagatatattgggatttattgatagtcaggttagaccagattatgaaatgttgaagtctataggaaatcaatatgaaaaagatgctgaagttgtaaatgaaatgtcaaaagagattgcagagtcagcaattaaaattgcagataatgtatctaaagtcaataatgctatagtgaatatttcgtcaaaatcacagcaatcagcttctagcgtagaagagatatttgcaagtattagcgaaaccagcgcatcagtagataatgttaccaatcaggcaaaagacacatcagaaatggctgataacatgattgaaatggcaaataaatttaaagtctagaaatatataagttctgaataatatagaattgttttatccaggcgctttgaaaaaatatgaggaattaaaattttcaaaatatatgtagagccaaatattcattctagtagaatggttatttggctttgttttaattctttggaaatttacatttcagtagaatctgtgtctcaatagtcgcctgcaatttttttgtataaatattaatatataatactttatttttagtgattatataatttattgcgatatataacaagtgaagtttgttacataatgtaacaattgatacagcaaatgtatttttttagagttatacttataaaaaagtaagggggagtataatttggaaaaaataatagaaatagagaaaatgatttgtaaaatgagacaatccttatatgaaattataaacaatgaaaaaagtttattaggaatagaagttattactgctagtcagaggttagacgacataataaatcaatacaatgagctgcttgataaaagaatttaaagaagttcacatcattaatatagaagtcttaaataatataattcattttatatatatgaacaaaatatgtattagacttatatggtaataagcagaaagttgaaacatttttatttcgctagactatgaaaattatgatttatctttatataattaaattttatggaaggaatttacatatttctgtataattagatatgtataaggagggaattttatgaatactatagaaaaagtcataatgaatcttaagataagaccagatggtatgaatttatatgaattggatagaatatgtttcaaaacttatcaaaagactctgctcggctcaaaacttggaagagtaaaagagcgtatagagcctactttaagatatttagaggaaactaatcaaatagcgattaaagatggaattgtcaaattaaaaaaaactgataaagtttagtatattcaaataaatatatttatttgaataagttgatatttatatagataatataatgataaactatacttagactatgaaatatattctgaccagaaactggaacaaaagtatattattcatttcggtgagctatactcataagtatggattatagttggtttatctataaatctttagtgtttaagattaataatagacagtggaggattagaaatgataagaatacttttatgctgtggagggggcttttcatcaagtaccctagccagtaaggttgaaaaggaaatattagagaataatatgcaaaatgattattcaattgaattttcgccatttttattagtaaataagagaatgagtgaatttgatatcattgtatgttgtcctcacctaataatgcaagttaagaaattggtgaaaacttcagagattgataaacctatctatattcttccaccgagaatgtatggtcttattagttttaaggaattagcaatggatgtagtagatgcaatcaatttgtataatgaaactaaaattaatccagtatattttccaggggaagaaaacaccatgatggtcactaggcatgtggcttacagaaatagcaaagtttaataaatcgttgtatataagttttaaataatatggttcattttttataaaattataatacttaaattattttataatttaggatgtagtcttcagtcagataaatttttaaaatcctatatataaaattctttaaattatagaaaatgaggtcttaaaattctcatattatcacatagtaaagaagagataccttcaaatttgtgaaagtatctcttctttaatgaaattattgtacggaagtatcagttgttgtagttattgatgtatttttcttttgatgagcttcttttttagcttcagatgctgctttaattttagcttgagcatctttaaatgataatcctgttatatcgattcctaatttctcagctcttgcactttgaattttagctattacatcttcatttgatagacctgtaacatcaattccaagtttagaagcttctgcttgatttaattttatcctagcatctttattagataaacctgttatatcaactccaagttttgttgctttcttagttaaatttgcaaggcttttagcttcaagggctgctttaattttagctgaagcatctttatttgatagtcctgttatatcaattccaagctttcctgcctctgcagataaaatcttagctttagcgttatcaggtgaaagatttgttatatctatacctaattcagttgcttttttattaagtctttcaagcgtcttttcttcaaaagctgatttaattttagctgaagcatctttatctgacagacctgttatatcaatcccaagtttttgagctacagcagctcttatttttgcctttgcttgatcattagttaatccagtgatatctattccaagtttagaagctttttgagtaagttttgcaagtttatctgccttattattttgtgatacttgccctgtagtaacactatttgttacattttgtgtagaagcatcatcagcgaatgctggaacaaggcttgatattgaaatcatagctgctattgcaattcctagtatttttttctttttcataattatctctccttacgtcatataaaaatttatttttatgttaaaaacatagattaatatagaaataaccggctataagggaattataattcttttatgtgaaatttatgtgaaaaggaatattaagcatataaatttattggcatcgcatttatatatttattgaaaagatgataatactatatattagaatgaaagttctagacaaatttataattaatctaatcaatataataatataaataaagttatattggggcttaaatggaaggagaaaaataatgaacgaagtaatacaaaatatcataacaagaagaagtataagggtgtataaagaagagcaaatttcggatgaagacttaaataaaatattagaagctgctaagttcgctccaagcggaatgaatagtcaggattggcattttacagctgtacaaaatagagagaagataaataagctaatttcagcagctaaagaagcattacaaaattctcctatagaacagctaaataagatggccaataatccaaactttaacccattttataatgcacctactatagtgataacatcttgtgataaaaacttaccagtaggacagtctgattgtgctgcagcaatacaaaacataatgttagccgctcattcacttaacattggatcatgttgggtacatactttagctatggttggagatgatcctaatgtcagaaatgtgcttactgagctaggaattccagaaaactatgcgacatttggtacagcaaccttaggctttaatggagggaaagaaccaaaagctccaacaagaaaagaaggaacagtaaatatagtaaaataaaaagagcaataagttaaaaaggtgacttctaaatatgtgaaaataaaaatgattaatgagactctatggttagaaagtattctagctatagagtttttagctgcataaattgataaaattgacatttctatggattaatcttagccattattaaaacacgataatattgaaatttatactatagtgtaagcatttcactaaagaattacagatttctaaaaagcatatggctatagctattgatgaatatgaaggaacatttggacttgtaactattgaagatattttagaagaaatagttggcgaaattcgagatgagttggatattaaaaattctaaaattctaaagaatttaagaatatatatttttaagaattttagaatttaagaattttacaatattttaataaaaagcagattgctcttaacattatatattctattttctgaaaagactaaaggtcgtacacgtccgcttttggaatatcctgcgtatccagagtacaaaggaagcggagatgtaaattacgctgaaaattttagtagagctacaccttaatgaaatggaaagagcttattctgttatataataaaataatgctgattaatcaaattgattagctagaagtcgggataattaatcccgacttcaactttcaataaaataatccgctttaaaggataaaattaatccaggttcaataaaatcttgttgtcataggctttaatgctttacgtcccatatagtgcgcctaactttagataaagcttcttttgatttctctttattcataaacatcaaaattacatagagtgaatctaagatgcttaattgagatatacgagaagataaggcttctgaatgaaattcgatttcttcagatatagaaataaaaactacatcacctatcttagctagaggagaagatgcatggctagtgataacaattacttttgcaccggcttcttttactatttcagcaatcctgatagtttcttttgattttcctgtatgtgagatacaaattgcacaatcctgtggtgttagtaaagatgcttccataagctgtatatgataatcagtactatgacggacatgagctggggaacgtaaaaatttatgatatgcatcttctgcaagtattcctgatccgccgacaccaaaaaaatatagtatatttgaatttgatataatctcagctgcttttttcaaatcgtctaatcctaatatcttcttagtattagttagtgttttaatgtttgaatcaaagactttttgtgccatagttaattcattatcatcaatttcaattttttcatgaattgatgtagttgaaaaattattttcttcaattaagatagccatcttaaactctttaaagccagaatagcctagtttttttgcgaattgaaataaagtagagtctgcaacattgagttcatcagataaatagctgatagaattgtgagccacagaaatgggattttcaagtatgtagtctgcaatattttgttctttagtacttaatccattgtataacgatttaattttaagtctaacagatacctccatgttggtcctcctttttataaattatatattgtaactttaaaaccactaaaaaattttgagcgtaatgtatatttcaaatagtattatatatatgttgcaattcacaatgcacatttcacaatgcacaatttcagctaaaattcttgcgatatttttagaattatgatgaagaattatttttgcaatatatatataaatcaaacttataaaagaaaatgatatagattttttgttcatatggtcgaatgaacaattgagtttaatatttatgaaaagtggttgaattattaaaaaatagcattgttataagtatatcaaatagtaattttgtgtcaatatcttgaatacgacaagtcaaactcagttccttatttgtatgagaagactaactataataagcatttttaaagcactaacaactaaatcattagtaatcttttaactataacgacttaatatgtctgctactttatataaatatcatagtatttcttaaattgcaagaggcggatagagatagaagtatgagaaaagcgcaatattatcaaaaaaaattttttttataaaaatctttacaaaaaaaattttttttgataaaatgaagacatgaaatggagggattgtatgaaaatagcaattataggtcttggtaagatgggtttaaacatagcatgtaatttaaagaatcataattatgatgttatgggatttgatttatctgataaagcaaaagaaaatgctgaaaaggcagggataaaaacatttgataatttagagaaaatcgttacttcatttactgaaaaaagagttatctggtctatgttacctgctggagaaattacggaatccgtattgaatcaattgctgaatttactttctccaaatgacattgtcattgaaggtggaaattcaaattttaaggattcaatacgacgtgcaaagacttttaaggagaaagaaatattttattttgattgtggaacatcaggcggaacttctggagcactcagtggtgcatgtacgatgattggtggagatcctgaagtatttaaggatatagaaccaatttttaaagatatatcagttgaaaagggttacttatatactggtcaatctggaagtggtcactttttgaaaatgattcataatggaatcgaatacggaatgatgcaagcaatcggtgagggttttcaaattgttaaagaaagtgaatttgattatgatctagctgatgttgcgagggtttggaacaacggatctgttattcgaggctggcttatggaaattgctgaatcacaatttaaaaatagtctaaatttagaagactatagaggagttgttgctgcatctggagaagcgaaatggactattgaaaccgctttggatatggggattgcagtaccaacaattgctttgagtttatttatgcgtaatttgtctcaagaagatgatagtttttctgcaaaggtagtttcggctttacgaaatggatttggtggacattctattgtaaagaaggataagtagatatgagagaatataagatagctattgttaattcaagtagttttggaaagatattccctgagcacattgatcgtttgaagaaaataggagctgttgattattttcaagttgataatgaaatgaatggaaaagaacttgcaaaattattaagtggatacaatattattattgcaagtgtgacgccctttttcactaaagagttttttgattacaaagatgagcttttgctcattacacgtcatggaattggatacaacaatattgatatcgatgcggcaaaagaacatgatactattgttgcaatagttccggctttagtagaacgagacgcagtcgcagaaaacaacattacaaatttgttggctgtattgagaaaaacaatggagtctagtaatcgagttaaagcggatcgttgggaagatcgagctgaatttgttggacatgcactttttaataaaacagtaggtgttattggagttggaaacacaggaagttgtgtagtagagattgttagaaatggttttagatgtaatgttttggcctatgacccatacaagtcagatttgtatttacagacttatggagcaaggaaagttgaattagatgaactactgacttcttctgatattatttgtttttgtgcaaatttaactaaagaaagttatcatatgatatctaaaaatgaaatagaaaaaatgaaagacggtgtttacatatccaatagtgcgcgaggagcattattggatgaaaatgcagttgcttggggattgaaatctggaaaaattgctggttttgcgacagatgttttagaagaagagccaggaagaaagagccatccttatctagcttttgataacgttttaataactcctcatacatcagcttatactatagaatgtctagagcaaatgggtaataaatgcgtaacagatgtggaacaaatagttcaaggtattttaccagaaagggcaattcagtcaacaagtaaattcattaaaaaataggggggataaaaatgttgacagatttaaaggttaaagttggtcctgagttttataggtatcatgaaggcgcaattgattttattccgcaattattaaaagaacataaatcaaagaatatcttgatcgtacatggaacaatttcttgggaaaaagcaaagccaaagatgaagtttttagaaacgatagatcaaaatgttttttatcatcaatatacaggtgaatgtagttattatggtgcagatttaatagcacaaatcgttaaagaaaatgatatcgattttattattggagttggtggcggaaaacttgtagatctcgttggatatgctggtcatatttgtaatgttaaatatggtgtcgttccaactttggttagtaattgtgcaccatggacacctttatctgttatgtataaagaaagtggagaatcagaaggaaaatctgagcattatatgaggcaggctagtttcttgataacagatccgcatttagtgattgattctccagtacgttacttcattgcagggctggcagatacaattgcaaaatggtatgaatcagattctattttagctcaaaaacatttgcagaacgaaccttttttaaagctagcaagctatactgcaaagttatgtaatgaatcaattgtaaaagaatcggctaaagcaatgaaagatatggagaataaagtagtttcggaagaatttgtacatttgtctgaaattgtgatagcagttgcaggtttatgtggaggattgggagataaatatgctcgtaatgccgcagcacatgcaatgcatgacgcaatagctaaatatattccggaaagccattcatatcttcatggcgaaaaagtagcttatggggttttataccagttggctctagaaggcaagtggtcgacgattgattctttaatgcctttctattcagatttgaagctgcctgtatctctgcattatatgggattgtatccagaagatgaaaaagttcttgatgatatagttggttttattgattcaaaagaaaaggttcatttaattcctattgtaattacgccagatattttgaaaaaaacaatctttgatttagaaaaatatgtagaaaagaggtagaagaagagtaatggaaactttaagtgtattacagagttttttaatcgctttgtgggttggcgcggttatgtcaagatggtttggaggaggagcttcattaacgcttcgattttcacctttaatgactggtttgattgttggtattgttatgggaaatgttggccaagcaatgattgttacagcagcgctgcagttgatttatatgggggttttttctccaggaggatccatgccacaagaaccatctattgcagcagctatcgcagtaccggttgctttattaggaaatttacagcctgaagccgctattgctgtcgcagttccagttggtttgttaggaagttatttatatcaattccgtttttttatcaatacattcttaggtaaatatacagataaagctgtagaagatttaaatgatggcgctattaagcgttcgataattcttttacctacaattgcatcatttgctctatttgtaccattggtatttgtagctttatattttggggcaccaattattgcagatgtaatcaatgctttgaaaggaagttatgtcattcatatacttgaagttgttggtggtggattagctgctattggtattgccacaacagtttatgtaattggacgtaaggattacttagcattctttttcttggcgtatttcatgagtgtttcattaaaatcattaaatattacaatggtaacttatgctgtgtttggtctattgattgctttaattttcagtatgtctcaaaaaggaaagaatgttcctagtacaaatgttgctaagggtacagagacattagatgaagatgattatgatgatgggttttaaggagtagataaaatgagtgaaaatgtaaaaagagctgctaaagctccagaagagatcacaaaaaaggatgttactaaagcatatttaagatggcattttgcaaatgaaattccacattcatttgaaagatatcttgcatcttctttgttgtatggaatgatgccaattttaagaaaattatacaaagatgatgaagcgttaaaagctgcttataaaagacaactattatttttcaatactcagttaagctggggtggtggagttattactggtttaatggcttccatggaatcacaacgtgcaaaagaagaatatgaacaatcagaaataacaatgcaagacgatttgatgtataacacaaaagctggtttaatgggtgcacttgctggaattggtgatgcaattgactcagggactgtgcaatatatctttattgccatcgcagttccctgggcacagcaaggtagtccattaggagcgttgttcccattcgtttgctttgctctttaccaagttttattgggtctattctttgctcgtcaagcatttgatatgggacgtaacgcaacaggattgatgggaagtacaggtgttaaaactgcaatcgatactttatctgttttaggtttatttatgatgggaatcttagcaggtaactatgtaaaagttagtgcaaatttacaatttacgatttctggaaaagcattcattatccaaaatattttagattctgttgctccgggtattttaccattagcagtagttatgggagtttatttcttctacaataaaaaaggtttaaaagttacaccagcattattatggttaacattaattttaattgttttagctggcgttagaattctatagagtaaaaaggagagttgaaaaatgggtgttataaatttagcaagagtagatgaacgtttaattcatgggcaagttatggtgactctttcacaaaagagcggggtaaattcaatttttgtagtagatgaagttgtagcaaaagacccattcatgagagatttatataaaaatgcaggtagccgtactggacaaaaaacaatagtaattacgccagagaaagctaaattctattgggatgaatatcagttcaaagattataattgtatcttgatagcaaaaactgtaaaagttatgtatgacttggttaaacatggagtgccaatgaaagaattgaatattggaggtattgcacaaaaagatgcaagtaaagatttactagttacaaaatctgtttatataaacaaagaggatgtagatagattagtagaaatgaaagataaatatggagtagagaatatctatttccaagctactccttctgctcctaaaacagaattgaaagatgttgttagtaaatttaaataattgtttttaaatgaaagattattattttccttataataaaaattggaggtttatcatggaggatatttttaacgatagattagctaggtattcgtttatgtatcgctcacggaatagcaataaagagaaaactagatttttgaaggcgcttgtaacagatatatcacaagtgcgaaaagatatttccgtaatcgaatatagtaatcaaaaaaaagccagtgcacgaaatgtatatgttggagatattgaaaaggcagatcaaatcgtttgtacttattatgatacacctccagcctatttaggagattatgtattgttcaatagaaaaaaacaagaaaaacaaactaaacaagccgttctttgtatgtctctaatttggatttccctaggtattctaggaacacttttatacatgaaattggtttctacaccatttgttttattttctgtgcaaacagcatgtcttgcactaatatacggtggatattttattattttatcaaagttatcaaaaggtgagtggaatcgaaagaatttaattagaaatacatcttcagtactttgcttgctacagatgttaacagagaatcaaaataagaaaaaagttgcttatgcatttatcgatgatggttgttatggcagacgaggattagatgtcttaatgagttctgtaaaaaagaatgcaaaggtttattgtttagattctattggagcagatgccactttaaatgtaatgggtaaacaatttaaagaagagcttgctgaatctaaagaaatccgatatgtatcacctagaggtcaaatcaattatttattttgtgcagatatgaatcaagataaagagttttacttagataagtcaaagttaaataagaaaaatttaaattatagtcattttactcaagtaatagaattgttaggcatatgaaagaaaataacgaattcaaaaagtcatgattatttttgattatgctttaaatcaaaatataaaaggaggttaaatcatgttaggaattgtaatagccacacatggtactttaagcaacggtatcaaagacgcagctgaagttattatggggaatacagaaaatatcgtaactgtaaatttaaatgcaggagatgatgttgagaagcttggtaataagataaataacgctattttagaagtaaatcaaggtgatggtgttgtgatattggctgatttagtgagcgcaagtccatataaccaatcagttcttgcgacaaatcagttagacccagaactaagagataaggtttatattattggtggagttaacttacctatgttattagaaataatcaatcatcaaattttagggacacaaattgaaatagttgcaaaatcagctgcagagaaagcaaaagaatgtattagttcatggcatttttctgctaatgtagatgctaatgaggttgatgaagatgatgatttttgatggagggataaaatgaagtggggatttagatggtatggagcaaaagactctattcctttaaaacatttcaggcaagttccaggaacagatggtgttgtagggaccttattaaataagttacctggagatgtttgggaaattgatgaaattaaagaatttaaggcttcaattgaaaaagagggattggagttacttggtattgaaagtgttgcagttcatgatgcaattaaagcaagaacaaaagactgtgatcattatattgataattatattcaaacaattagaaatttagcagcatgtgatattcatttagtatgttatagttttaaaccaatttttggatgggctaagacaaatttgaaatatgaaaacccagatggtagttattcattgttgtttgatcagtctgttgtagaacatatggatgcgagtgagatgtttaagcttataaatagtcaatctaacgggtttaaattacctggatgggaagaagaacgtctgaaaaagtttaatgatttgatgaaaatgtatgaaaatattaaagaagaagatttatttgacaatctggcatactttctaaaaaaagttattcctgtttgtgaggaagttgatgtgaaaatggggattcatccggatgatccaccatgggaaatctttaatcttccaagggtaacaaaaaatttagaggattataaaagaataataaatattattgattctccttataatggtgtaacactttgtacaggatctttaggtgcaaatccaaagacagatttagttaaagttatacatgaattaggaaatagaattcaatttgtacatttaagaaatgttgaatttttgggaaaacaaaaatttagagaatctgctcatttgagtatagatggatcattggatatgtatgcacttatgaaggcgcttgtagatgttaattttgatggtgtcatccgtccagatcatggtcgttcaatttgggatgaaatagcaatgccaggatatggtttatatgatcgtgctttaggttttacttatttaaaaggattgcatgaagctatcacaaaatctcgaaaagaaaatggattggagcaataataatgagtgtagatgtatataaaaaattaggagaaataaagttattaccactttatactgcaactgatttaaagcatttagatgatttggaagagattcttttaagaaatgatgtaccttttatagaagtaacatttagaagcaatctggctttagaagcaattaataaactttcacaatcgggtaagttaattgttggagcaggaactgtgcgtacattagaagaagctaagaaggcaattgaaaatggagcaagttttatagtttctccagcagtgattccagagataatcgaatattgtattgaaaacaaagttccagtatttcctggaacagcaactccaactgatattcaaaaagttgttagttatggacttcatgttgtaaagtatttcccagcagatatttatggtggtttaaaagcaattaaagcattaagtggaccattttatgatgtgaaattcttgccgacaggaggaattaatgcagataactttatagattatgttagtaatgataatattttagcggttggtggatcttttattatttctgaaaaaatgattaaagaggaaggtaaagagaagacaagcaaattgttaaaatcattagttgatcaaattaaagcttagtgcaatattgcacggcttttttttgatgatcatgtaattaacgacgtgactccataacctcttggttgccatctattctaatcataaaaactgttgcagtaaatgataaaaagatattcaaaataagctgcattaatatagagatcaggaatttagtagtaatgataagaataaataaaaaacatgaatattgagtattgcgttttataatctataatgttatacttcttttaaggtactgcagtaccttaaaagaagtataacttggaggtgtttacgttttgtcaataatacaaacgaagaagttaacaaagagttacggatcaaaaaatagtgtttatgatattaatctgacagctaatgaaggtgaaatatatggttttctaggattaaacggtgcaggaaaaacaactacaatgcggatgttgcttaaaatgattaatcctacatctggtgaaatttattactctggacaatcaatttcaaagttgccttttgaattttggaatcaggtgggttacctaattgaaacaccacatgcttatccaaactttactgtagaagaaaatcttatattatatgcaaggcaaagactaataccagattcagaaattaagaaacgaatttatgacatttcacagcagctattgctagataattacctacaggttaaggtaaaagatctttctttaggaaacaatcaaaaaattggattagctaaggcgcttattcataaaccaaaaattcttttgttagacgaaccaacaaatggattggatccagaggggcttgtagtcgttcgtaatcttctactagaaatggctaaagatgggacaactatttttatttcaagccatctattagatgagatggaaaagctggtaagtcgaattgggatattagcacatggatgtctgctacgagaattaaatttttcggaatttgaaacctgcagagaatctaagctttacataaaaacggatggctctgtcaagaatcttgagcattaccttgctacaaaaaacttgcaatgcacatcagtaagtgaacaggaaatacttgtttcggatatatctattaaccaatattctgctttattacagcagttaggaaatcagaaattgaatccaatgatttttcaacctgtaaatgaaagcttagaagaattctttattagaacaattaaggagggcaaatcattatgaaacagatatggtcaatgactaaaattgagttttataaaataatacgaggtcatataccaatttacattttagccttttatagctttttattacttatccatatgcaggataaaacgtgggaagaatttttgaaaaatactttttttatgtattctactgttattggattaatgggatttggtattttaagcagctgggtatttggtagagagtatcaggatcaaacttttaaagatcttttatcattgccaatttctcgtacaagtttagtatgtgcaaagttctttgctttaggattaagttttttaggcataacggtattagcaattggtgggacatttgccatgggtttgtgcttgaattttacaaattttgatgtgttattgactgggactcttctaaaaaggttaggtatagtaacactctataattgtagtcttagttttctattcccgcttatcgctagcatcacgcgaggaatattggctcccgttagtacttcctttgtagctataattatagctgccatttttggatcacagcccttaggccgttatatcccgtggacaatttcaggaatatatttaaataatcctcagcttattaattggatcagtaaattgacgattttggctattttatttattggtgtttatggtactatattatggtggaattatgtagaccaaaaataggaggttgtatcatgaatgaaaatgttagtagacgccgtggcgttatacttgaaaatgcgattttagatcaggcttggttattgcttaatcaaataggatatagcaaattgactatggatgaggtagctcgtgctgcaaaaaccaacaaaaatgctatttatcgtcgatggccacaaaaatgttatcttatttttgccgcattaagccgacatgcaccatcaatagaattagaagtcagtgatcatggttcgctaagagaagatttaaaggccttatttaatgttttaaatctatttgaaattatcaggcccgatgatctacgagatgtaattttagatatgctttctaatatgacgccttacgatttatttaatgttataaacaacggaaatggtcttcgtgaatcaactgaaactattataacgcgagctaatcatcgcaaagagatttcactttcagtagataatatttctgaaaaggctttaaatttaccagctatactaattataaatgagcttgttttacatggaaggatcacagaaacgaatgccgaggatattattgataatattttacttccgatatataaagcgtgtaaataagctaattggtaagaataacatgggacttataattaagattcctttgttatttcttaataaagaaaagagctggagtcataacataaagacaattagattagatttaaaaggttcaaatgttgattaagaaataatacttggaccttttattaattagctcaatatgtaatttagggaatgatttatgtaggctaaaaaatgagctatcgctaatggattttaatccgctaatgcgacagcccttataatgcctattttaatttcctaataggatctacttactaaaccatgctttactaagtaaattaacgccttcagcaatatcactgtcagtcatcccaccaaaaccaagtaaaaccatattattagaatatttatccttgcgtaaccaatatgtagatacaggagaaactataacgccgtattctttagctttttctattatctcttcttcagataatccattatttaattctagcaagatatgcaaacctgcatttttaccatgaataataacattatctcccataaatttatgaatagagtggattaacatatcatgtcttcttttgtttagtagagatatcttgcgcagatgactatcccaatgtcctaaatgcataaactgttgaatgattttttgctcaactattggaactgaggtttggtagctactaaaaaatttatcatatatttctagtaatgattggggtaataccatataattcaatctcaagcttggggacaaagattttgaaaaagttccaatatatataacacagccttctgaatcaataccttgtattgaaggaattggccttgaattataacgaagttcactatcataatcatcttcaattataaatccattctctcttcttgcccaatctaataattgcaatcttttttgaattggcatcactgatccagtaggaaattgatgtgaaggagttacatatactatctttgcggaattattttctaattcagcaatatttattccatccttgtctaagctaattggaacaacatcatatccgttattgttaaaaatctttcttgcgccaatgtagccaggatcttctaaagctactttagaaaaattgtttctgaatatctggcatagtaaacttaaacactgctcaaagcctgaagtaatgataatttgttctggagtacatgagacccctcttgatttatttaaataatccatcatttctattcgtaattctttttcacctttactgctagtataggatgtcataacatcagcatctatagaggccaagcatttatttgatatcctcctccataagcgcaaaggaaaatcagaagcatttaactttccatatttgaaattatacttacaattattatcagaattcatcttaggtaaattagtttttttatatttttcaatattgacagagttatctctctttaacttagtgattagcatactatctagtttttcaactatgaatccgctgcctgctttacttgtgacatatccttcagaagaaagttgcatataagcactttctactgtatttctactgacatttaatgttgttgcaagcgttcgtgttgaatatagcttactgccttccaaaagctgtcctgaaattatctcttcttttaactgctcataaatttgcaaatatagtggaactcttgaatcgttatctagaacaatcatttttttaatcactctccttatgaactgtatcctataaaataaaaagaattggcacttttgatgattacacatcgattgtataattggtttatagaaaagtcaatgtgcacaaattaagactttttacagatattaatataatttaatttgtagaaatacagaggaggaatttaaatgttaaatgaaaaattacttgaaattctatcacatgaaggtgtagtggctatagtatcttgcagtaacggcgatgcacatgtagttaatacttggaattcatatgttgttgctactgaagatggaagattattaataccagcagctggaatgagaagaactcaaaaaaatatagaacaaaataacaaagttaaggttactttaggaagtaaagaagtaatgggacatcaacatccaggagcaggattcttaatagaaggaactgcaaaattccttgaagagggttcagattttgatatgatgaaagaaaaattttctttcttaagtagagtattagagataacagttatatctgctaagcaaactatatagtaataatatgacatagcttttgaagaagagtactttatattagtgaaatatctaaaaaagtactctttttagatactattaatatggattatgtaagtttaattcagcaatatatataggatataggactatataatatgagaagttgcatagcaattgattatgttcgtatataaataatcttatctagcaattagagggcagtttattaaatataggataaagataattattgtaggaaaacagttaggatattattattgactcatacctaagggtaggaattaaaataggtttataaagagaaaataatcattcatataatttgcccaacatgtagatttgtagtagcaatttataaaaaatataaaaaaacaaaaggaggaacataaattgaaagttgatttttatacatctaaaagagaatatgaagaacataaacaagaatttgataatgctgttattagcgttatgcaagaaggaatttcaacccttggaaaagaggtgactgattttgaaaaatctattgaggagtttactggagctaaacatgcaattgctgttgcatctggaactgatgcgctaattttaacttcggatattttagggtttgaaagcggaaaagaagtcatcacatctccatttacttttcttgcatctacttcatgtataacaagaagaggtggaaaaccagtttttgtagatattgatgaggagacttttaatattgatgcaaataaaatagaagaaaaagttactaaaaatactgttggtatagttccgattcatcttttttcacaaatggctgatatggataaaataatggacatagcaggtaaacataatttgagagtacttgaagatgctgctgagggatttggaatgagatggaaaggaaatggatctgaatatagacattcaggcactattggagattttgggattttctcattctttccaaccaagactcttggtggttttggggatggaggaatgatagtgacaaataatgatgaattagctagattagctagaatgtatagagttcacggagcatcaaaaaaatatcactatgaacacattggatacaattcaagattggatactatacaggcagctattcttcaagtgaaaatgaaatacataaaagaaagcattaaaaagagagaaattgttgccaattggtattttgataggttaaaagattgtcaggaattaaaatttgccactttgaaaggcgagcaaaatcccgtgtattatgtatttaatatattaacagaaaagagagatgaacttggagaatacttaaagaaaaatcagattcaatttagtatttattatcctataccattacatcttcaaaggtgtttcagttatttaggttataaaaaaggggattttccggttgctgaaagtatatgcgagagaatacttgcacttccaatatatcctcaaataacagaagcagaagttgattttgtatgtgaaactatcaaaagtttttttaaataatattagaagactgtaaaggtgaattaaagaattgaaaataccacgataattcttgcagaaaagtaagatagttcggtagttcattggttgaataaaccttggtcgttttattttacaacatctcttatataataaatcaataaaaataaataacaaattgtaaagtcgcatattcaagaaatgaatttgcgattttttatttatagagctagataatttatggcaaatggaagtacaaaaaatgaaatctttactttgaatatatatataagtaggcaaaaaaataacaagtcatatgctaagcctatttccaattatgctacgtcattcgattgtcctaatagagccgctatgaaggcaatctacttctttgcctaatgaaaaataatcagggcatttgggtcttgttatttttttatgtgtcttattttttgttttatatgatattatttaataattcattttttaccttttctgctgattattatagaggcaattacacttattacaagaattagtaaaataacagaaatagaaatccctatagatatatgatacttaaatgatattccaagctttataccagtaaatataagtattaaggctactccgtatttaacatattcgaaggtgctgtgtagtttttctaaaagaaaatataaatttctaagacctaatattgcaaaaatatttgatgtgtatacaatgaaaacattagttgttattgcaaatattgcaggtattgaatcaatagcaaatagtaaatctgatccttcaattaaaaataatatggcaaataatggtgttgcgtgaagaacattgtttattcttataaaaaacttttcatcatgaagttctttagttacaggtatcattttttttagaagtttaattagtttactgttctcaaatgatacatcatcttctttgttaatcatcatttttataccacttataataagaagtataccgaagatatatagaacccattgaaatgtatttataattgcaatccctaatataacaaatataaatcttagaacaatagcaccaaaaattccataagttaaaattcttttttgatgtttagcggtaattccaaagcttgagaaaattaataaaaagagaaaaagattatctacactaagacttaattcaataatatatcctccgagaaattctaaagctctttcagaacccatgtaataccatatagctaaattaaatatagcggctataaatgtaattaataaaaacttaaataaatgttttctagtagacatttttgtagctcctttcagataaatttgtatttaaatcgaatatattttttaatatattcgaaattttatgtgaaaacaatattaatataaattttgcttttttgcgtaaattataataactttaaaaagtaattataaaacttgcttaaaataatataacaattgtgtaagaataaatcaataaaagtttatcatgttaagatttttataatattgacaagttttttatttaatagtattattgttaataacaataataaaaagacagtgataatctcatttatagggggagtaactgcctgttaattataacaggattcaaagtcgtcattacggagagatcccggctttgaaagcaaaacaatgcttagtgagactctatagttagaaagtgttctaactatagagtcttttttgttacataaatttctaacttcagaaaaaattatcaaaacattttattaattaagtaaaaggaggaaaacaaaatgagcggtttaggaaatcaaattaaaactttacttttgatgagtgtcctgacgatattagtagtattaataggaagaggtattggaggtcaatcagggatgctgatggctttggtgcttgcattagttatgaatggaggaagttattggtttagtgataaaattgcactatctatgactggagctaagctattaacacgaaatgataatattgaaatttataatatggtggaaagattgacagcaaatgcaggaataccaatgccaaggctttatattacaccttctacacagcctaatgcgtttgcaacaggaagaaatcctaagcattcagctgttgctgttacacaaggattagtgaatatactaaattatgaagaattagaaggtgttattgctcatgaactggcgcatattaagaatagggacgtacttataagtactattgcagctgtaatggcaggagtaatcacaacaatggctaattgggcgcagtgggcgttaatgtttggcatgggtaacagtgatgaagaagaaggctcaggattcttagcagctttaccattaattattttaggacctattgcagctatgttagtacagatggcagtatcaagatctagagaatatcttgctgacaatacaggagcgaggattgcaggacatagcagaggactctctaaagcattacttaagttagatcaggcttcaagagtggttcctatggacgtaaatcctgcagtaagccatatgtttatagtcaatcctctaagtgcgaaaagattaatgaacctatttagcactcatccaacgatagaagatagagtacgtaggcttcagtcttcaaatttataatcttaattaaatcaaatatcttaaagcatctgtaaatcagatgctttcttaattctctaggaatttatattcaagttaaatttgtggataaattatggaaaagactaattcagaaagttaggatttgtaaagagaataaaaaagaaaatatattcgcctgcataaaatgttcttatatgcagaatagttcagtattgtagcatagctactctttttataggtgcatagctgccatttctgatgtgcagatttttctcacatacgttcgaaaaggcagatgcgtaaaaaaatctccagccccaaagtcgcctgcgattttgttcaacttttcttaaatagaatcaagtgagatatcaagaagtctaaaaatcatacccagataaattcgttaaatttcaaattttagaatttcatgaagatgagaagttcaaatatcttgatgaagttggcataacaacggccgtaaaatatagaagagaagttatgatggaatttacaaaatataaaaatggtcagttagttgcagcaatgaaaataaaagtatgagaatagaaaaggtccaatatttttatacgtgaggaaggtgtaattaaaagcaacttgaaatttaaatatagcttaaagcaagaaatgaaagtgctgtattattctagagtgaattatacagcattattaattatatatgaaaattaataattaaaaggttatatatcagcgatagagctatttgtacaattaattagaagtgctgtaatttaatttcggtattttattttaatttatttttattaaataacttcccattatagacaagaaattaaaagcttttatcctgattattaagttgtgagcaacgattaaattccatttctaatactgtatttaccgtatgtttacctaggttatctaaagaattatatttttttaataaatattctaattcttctgatagttgtaaacgtgtttttattttgttttcatcccatcccattaaaatagatggagttgtttctaatattactgcaagtttttcgattttgtcagaaggtatattagagattacaccgctttcatatctttgaagtgttggcttactaatagataatcttttagaaacatcttctaatgtgagattcaattctaatcgtctatttttgatattttctttcaaacccattttatatcacctcttagttctatattaaaagtaagtaaattatagattatcaattaatataatttattgataatctataataaaatcgaagcgttctaataaaacttaataactttttatttattttgtttactgcagttaggcaaattaaaaaaatcattctaatttgtagactattaatataatttattataacatctgtttccggatatgcaacaattattttccattatatagaaaaagttacgtaagaagtattgacaataataggcataatatataaaatattacttaacgagtaacgaaaggggagcatttatgatattagttaatgagttaaaaggaaaaataaaagcaaaaggatatactcaggaaaagctggcaagggaattaggaatgtctccaaaaaccttaggtaataaacttaataaaggaatatttggttcaaatgaaatcgataagatgataaaactattagatataaataatccaatagagattttttttaataaataaattacttaaagagtaaaatgtattgactttatatatagtattagaaatctaaaattcattgtatatattgcaaaaataattctttatcacaattttagaatcattgcaaaaattttagctgaaattgtgaaatgtgcattgtgaattgcaacgtatatattgcgatttaaagtattatgttacgccatatttattgttgcagaaggacaagctatggaagaattattaaaagaaattttagttgaattaagaaaatagtaatcttaaattaaaaaataaatgtaaatttattttcatacaccttgaactagaatgtatcagggatacaacttttgatataaatgtataaaaagaaagcgaggacttacaaatgaattttaggatttttaaatgttatatagatgtttgtaagttaattgagttaaacccatcatggaatggtctcgaaaggtttaggcaattttatttatgggagcgtgaaaataatggcagatattaaatggattaaattagctactaatatgcatgatgatgaaaaaatgaaattaatagattcaatgcctaacagggatacaattcattacgtgtggataagaatacttttacttggtggaaaacttaatgctgatggaaaggttttcttatcagaaggaaaaactcttactgccaaaatgttagctgtattattttctaggcctttagaggatattaagattgcattaaaagtattatctaactttggcatgattgaaatagcttctgataaagtaattagaattgtgaactgggataagcatcagaacatagagggaatggaaagggtccgtgaacaaaatagaaaaagagttgaaaatcatagagaaaagaaaaaagaagagaagaatttagctaaaagtaataaggaagaaactcaggaagatcaagtcttagaagaatttatagaattagaagaaaatcaagattttaatgaaagtgtagaattagaaaaaactaatgaattagaacgaaagagagattactctgagaattctattatagaaaaaaacaaagctccaggtaaaaatgatatattagaaaatttggaaactaatgaagaggcttctgaaaatacgtatattaatgataaaactaatattactactagcgaagcaggtaataatagtactgtagaaattattgataataatgaagatatcagtaataacattttagaaactgatgataataattgtattgttactaaaaataatagtaacgttactcaaaataaaagtaacgttacagtaacgcagcagaataagaaagagatagagaataagaagaataagaaagagaaaaaagagatagataaagataaaaacataaagagtaaaaagaataatggtttttatataaataataaatgctcagcttgtgaggaggaagttagccagtcgaatttatttaagaaacacaataatactaaaagtgaatctggggaagaggaggacataaatcttaaagctttagagcttatgcattatcatgaaaaaataacaggaaagccaggaggatgtgactatgttgctcttagatcagctattgatattcatggagaaaaaatggttaagatggccatggatgttgggtttgaaaagaattgccctgacataaaatatgcaatcggggtattaaaaaactggaggagaaatgggtatccagaagatcatatggaggtaaagaaaaatggggttagaagcaatggaaagagtaacacagcagataaaaatgaatttgcaggattcaagccaaaggaaccgcgaaaacttacagaagctgagcgaaagaggattgaagaaaaactcatataaatgcgataaatgctgtgatactggatggatacttatcccccaggaacatatgcagcctcttgctgtagcctgtgagtgcaggaaaatagaaaaactaaagaatgagtggaagtattcaggaattaatgttgaacaaagtaaacttactttctctagctttgaagtttggaataatgcatcacaaaggatgaaggacactgcagcagcatattgtactgattttgatgaaataaaagataataggcgaaatagtatcttattatgtggacaggttggcagcggtaaaacacactgcagcattgctgttgcattaaattttttaaaacaaagaattaaagtggtgtacatgccttatcgtgatgtaatcacaaagataaaacaaaatatgattgatgaagaatattatactagcaccatttcaaagtatcaattatgcgaggtattacttgttgatgatctctttaagggaaaaatcaatgaaacagatacaaatattatgtttgaaattattaattacaggtatcttaattttctgcctattatagtcagcagcgaattctctattgatagattactgacatttgatgaaggggttgcttcaagaatatatgaaatgtcaaaagattatgttgtagaaattgagaaggatattagaaataactatagacttaagtaagagcccaaaaagtgagagtccaaattttatatttggttactcaaactttctctgtgagcttttatatttggctgctcgcacttactcctatgaacgaatgtgagtaggagtttccttgattgtgcctaagctaggttatgaaaatgtgattttagaaaagaaaatagagatattggaagaaaagacaagagtaattcaatgcaagaaataatttatatgaggagaatgtaaaaatgaaagcatcaggaatagtaagaaagctcgacccacttggaaggattgtaataccaaaagaaataagaaaggtactagaaatttacgagggagattccatggaaataattaaggttgataatggggtggttgttaaaaaatatattaaaggatgcattttttgtggaagtgataaagatgttgttgaatttaatggagcagttgtttgcgatggatgcagaaaggctttagggcaggattaaaccagttgatatgtggaaagatggatggacaatatatagtcaagatactgaaatcagaataaataagatatatgctttaaaatgacttaaaaacaatataccatgtacgatcagaatttgttgcccatgagcgtatggttgaaataactgaaaggcgtcaagagcattatagcttgtctgttaattgcaatgtaataagtactatattcaaattttctgctgaggtaagaaaataatttatacaacaaatgcaatagaaagtttgaatggtacttatcgtaggctaaatagacaaagaagtgtttttccaaccgatacaactttgttaaaagctttgtatttaacaacatttgaagccacaaaaagatggactataccttataaaaatttgggtaaggtttatggagaactttcagtcatgtatgaaggtcatttataaatgataatcaaaaaacgctctttctcaagaacgttattgatatgcaatctaacttaacttattagaaataagataaatagcttgtaaaattctacttttataaatgttatagtttttttatctatatcttaaaaagcttattttacatatatcgtttgaagattatagttttataaagtattttcaatcagtcttttaatctcttcctttggtaaaaagccaacaaattggttcacattttcattattcttaaagatagctacagtaggtatacttgaaatgtgatattcatctgctaaatctccacttttatccacatctacttttataaaattgactttttctttcatttcctctgataactcttcaagaatcggtgctatcattttacaaggtccgcaccaggttgcaaaaaaatctacaaccgtaactccactttttatttcatttccgaattcattattatctactattttcatattatattcctccattttcctttatcagtgctatagattattgacggataaaatttgtaagtattttatcttctttttctggtgcttctatattatcttttccatactctacaagtttaagcagccaagccatatttttagctaaggtcttcattatttgaaccccttcttcatcctgtataacttctcctggagttgtgccatgaataacgttccagtatcttgatgatggcattaacatctcagaataattaatgtacttgtttagctgatcaagtgcagctgtacccccagaacgtctaaccgctacaacagctgcaccaaccttatgtcttaatatgctgccattattttcatttacaacaaaagctctatccaagaaagatttcattgccccgcttattcctgaataatgtacaggagaacctagtattatcccatctgcctctttcatttttccgatccattcatttacagaatctccctttaaaacacatttttcattttgatttttataacacccccaacatgacatgcatccctttatagcttgactacctatatgtattatttcaacttctatatcttgtttttctaattcctctgcaattaattttaatgcatgataagtgtttccgtttttatttgggctaccattaaaagctacaactttcattattaaaaactccttttttaactctaatttttattcaaaatattataatattctcataaaattattattacataaatgcttcaagtaaagtttggaacttatctaagtaaagtaaactaacttcactttatacataattatgcagatttatatcaccttctttcaaaaagtaaccttcataaataagagtttgtaagtttcctaattagctttttctaatttttagatataacttgttatagtatatattaaagagatttgatatctttaatatacctaaaaatgttttaaattcaattaacagaaatttaagtagtaattctttaagcttcttacagtttttttattatttcttagaacccctcattttgtagttactttaggattaggtatattgtagagtctatttgtctgctattataaagacacaaattaattttgtcaatattttaaatttattaaattttgtaggttttaaatatgtggataaaatacttattgacaaaataatatattatatttattattatagataaataaactctgcaatatcttttaggaggttttaatttgaaatatacaaaagcaacaaattatgctctacatacaattgtatatatgatggaaaatgcgaaaagtgaaaaactaagcgtaagtgctctagcggaacactttaatttatctactacatatctttcgaaaattttaactcagctggtaaaagctgatttaattgagtcaactccaggtgcaaatggaggttacgttttgcgtaaagacatgaagtctatttcttttatggatgttattaaggccactgaaggaactggctcattatttgtttgcaatttaaacgaaaatagcaaatgtttgattgaaaaagtaatgtcagaagctgaaaatgtactagaaaattatctagaagataaaaaactatatgatctgactcaaaataaatcaaactgcaaaaccaacaaagaataaatatttacccattaatatatgggtttttatatttgaattgtagatattatatatctttaatatatctaaaggagaagttacataatggacaaaatacaagaacttgaacaaaaatctattggtaaattacttatacaatattcagttccaacagtactcagtttattgattaattcactttatatagtaatcgatcggatgtttataggaaatatatcagaagtcggaactctagccttaactggaattggccttacaatgccaattactacaatagtagtagcgttatctgcgctcatatcaatgggggccagctctaatatctctataaaacttggagaaggcaataaagaagaagctgaaaattttgctggaaatgcactatctctaagcattgttttagggcttttggtcaccagcttgtatctgatatttcaaaattcaatattaggatggctcggtataaacggtgaaatattatcttataccaaagattttattacaatcatcatggctggtactatttttaatatgatgggattttgtctgccttttatcgttcgttctgatggaaatcctatattttcagctgctattacaattacagggtgcattcttaatatattacttgatgccttatttatatatgtatttcacatgggaataaaaggtgcagctattgctactgtcattgctcaatttactaccgtaattcttggactttattatttcatgaaattaaaaaatactttaatgcttaaaaagagcaattttaaattacatatttcaattgtaaaagctatttttttaattgggttagttccattttctaatcaattatccataagtgttgcacaaattgtaagcaattattctttaaatttatatggtggagaactagcaattggcgcaatgactgtactaaactccattacaatgctatttttgatgccagtttatggaatagctcaaggcttccagcccattatcggttataattatgcaaaaaagaactatggcagaaccctgaagactcttgcccttgctgttttgtttagcactggattcttggcagttagtgctataattatgcagctatttcccaaattcgctgttagtctttttacccagaaccctgaacttgtgaatatttctgtaaatggcttgaaaaaatatacagtgcttatctttcttatttccattcctacctttggctctggtttcatgatgctaacaggtaaacctaaaactgccgtactattaagtatatcaaggcaatcagtgatattagcactaactatatttttcttaccaaaggtaattggtcaagacggactatggttcgctcaacctataacagaccttttgtctagcattatcacaattatattattcataaaaggatatagtgatattttatacaaaaaaacatcaacaagggtataagaaacacaatatcaaggatactttagttaagtgaatttttatcaatttacttaagctttcatataaaaattagaagtaaagaaaaaatggagatttatccttggatttaggacaaacctccattttatattcaaagactaagtctaagctacatcaaatttggtaacttgtctttgagtaacttgagcaccagatttcttaactaaatcaccagaattagtcttgaaaacattcttagcaattacagtatccataagtgcgttgatctcatcttttgtaagagtaggtttaacaccagaaacacttaaagtacttttttcaccggctacagttaaaaaagtcatagataaagaatattccatttaatttccctccaatcttaagtagagaactcgaatctatgatttgatggtggtcgcttactctgtgagcactcagcgaacgaatgtgagtcgagtttcctacaatatttttttagaataagatcctaagcatttgctaagctagaagattcattaataaagtaatctctagtattagcttccataacacctttgattgcatctgcaacagcataaacattttcaggtgtcgcatctgtttttatacctgagaaagttttcttggtataaattggatataggaataggtaaggctttgaagtaatcgctaccttttcccctccttcgcaccgtacgtgagagtttccagctcatacggcgctccaacaataattatctttttattaaataactgaatttcctactaacattcttaaagaattaacacgttttaacccttttttatcaagggacaataaacctagatatttatcaataacatcttgttctatagcatgtactaacttatgagctttgctacatagccaaacaagattttcatacttatcagttccgccttcactttttagtattttatgatggcattccatattgtcagtttctaaatctaaaccagttatgtagcattttcctttttgtcctacaataagagatattcgattatcgttgaattcagcagttttactgttatttacagttttcaaaaggtacttaattaggtgagagtatcctctgagtttactgtgaatcgcaattctaccttgctcagtatagttgcatatatcttggctaaaattcataggtggtttagttttacaaccataaatagggaagaccgacacgttgcaaacggtccgtactttgccattataattaccatataaacgcatataggtttcagtaaaattaggcttactggttattatattccttaatcgtatttccaaggtttttgtaactaagaaattaattctattaaaatctatatttacataagtagcaatgctataataattatggctacctaatattatagaattcagtcttgaaacttctttgccgtttcttgatttttgaattactttaatttgatttttcatattattaatgatagactttattgctttatcgcatattcgactttgacaaacatacttacctcttttaggtttaacagttagtttaaagcctaagaattcagtataattctttctaagattagttattttagatttatcaggacttatttctaaatctaatctctcttttaaccataatcttgtagcattatatattttctgtgcagttttataatctctgcagaaaagtttaaaatcatcagcatatcttactaaccatacttctttgagattggtgtttttaaggactctatgctttttgcttttattgctataagtacgcctagatttgaaagtttcccattgggagcttatccaccaatctaattcgttaaggacaacattagatagtaaaggacttattataccaccctggggagtacctttagttgggatacctataccttcaatttcagattttagaattttatccaatatactaatcaaatttttatcatgcactcccaaattccataattgctttttaagtttgctatgatttacattatcaaagaacccttttatatcaatatctacgacataatgtaatttagcaaaatttattagctgcatacttctagctatagcatgttcagttgacctgtttggtctaaagccataactatatttatggaatttagcttcgcatattggttctagtacttgcttaatacattgttgaatgattctatcatcaatgcaaggaattccaagtggtcttaacttaccattttgcttgggaatttcaactcttcgaacacttttaggagtatagttagcaaattttctttgtatatattcaataaatttacttgtttccatatcttcaaagtgagttatatcaagtttatccgtcccaacggtagttgagcctttatttcgcttaatatttctgtatgctaataagatattgttatcagaaattatatgttgcattagatttctaaatttataattactacacgattgtttataaagttcgtcaaacgcgctttgcatagcgtaatattcgttatttcttagtagttgtcttttctctaattgtatgcgttccttcaagtctactacttcctcctttgtagaaatacaaagtaagtttcatatctcttagtcttacccgaaccttgaattattcagtatttaattatcaaataacaattgtctagtggctattgcttaaattactattacagtaattatcatagcttcatgccaccgctctcacttggattaagataagttgtatgtttttacattttccttatcactacttcataggcagtaaaacctccatattccaagctttccttgttccgttattactatctttacatatatctttaggtcattggtatgagcctgtaagcttgatagtgcccgtaacactatatggattttcatacaggcgagttttactaatccacacttacgacacgaatgtgttatattcatttctaaatattcaaagtttagacccgtacattcccaatttcgtcagttcccgctggaacatcctaaccatagatattttatagacccaagctctatcaccactcgaccacctctggttcgcatttcgtgtgaatataaatattcacttacggtggctcttaagccttttaacgagcttataacaaataattatttacttaattaaatgctattcgtactttggaaaggcatttcaaggcgttacccaatcattctacctttcgtaataacagttctagttaaagtattttaactaggctagttttgtagtaaacccacgcttacctttgtctagcaacaagtcgcacccgcctgctttatctagagctttttggacttcaatactgagagaaacagagtcaatagttttagtcacagccatagttttaacctcctttattttgttttcataaaggatatatgtataaattttagttattacataaatagatgaaaattatttctaattatgatcaagtaaagtcaatcacaaatcgaaaaattattcctaaattgtccttatttcctttagctctaaaatttattacataatgttgacaagtttcgagtttaatagtaatatagttgataatattattaaaaaagataataataactgcatttatagggggagtaactgcctgttagttatacaggattcaaagtcgtcattacggagaaatcccggctttgaaagcaaaaaaatgcttagtgagactctatagttagaaagtgttctaactatagagtcttttttttatccttgtaattaatttcaaattttacaaaagattaataaaacggagaggtgaatattatggaggttataaattatttgacaaattatattacgtacatagtcaatgaaataggatatgtcgcggtggtgataattactgctatggaatatgctgggttccctatgatgccaagtgaggttatattaccggctattggaatactggctgcaaaaggtgaaattacatatttaggtgcattaagttttagcattttaggtggattaatagggtctttactatgttattttcttggctattatggtggaggtgttttgatagaaaaaataataataaaattccccaaaaccaaaaaaaatattgaaacaataaataattggttcgaaaagtatggtaaactagcaatcttttttgcaagattagttcctcttactaggacttatatttcaataattgcaggaactgctaaatttaataagaaaacattcattttattttcagttatggggataataatttggaactcaatacttgtttcactaggatattttatagggcataattggagttacattcatctaataataaaacaatatagtatttttgcttctattataatttttacagttatacttttagtaatctataagaaattaataagtagaaaaccaattaattagaatagagtaatatataagcaaaattaccaatgttttagctactttggaggtattatttatggaattagatactgaacggacgaatataacatcgcaattaattttaatagttattttaactttggttaatgcattttttgcatcagcagaaatggccatagtatcattaaataaaaataaattgaaatttcttgaagaagaaggaaataaaaaagcaaaaattttattaaagcttatggaagaaccaactaacttcctatctactatacaagtaggaataacccttgcaggattttttagtagtgcatcagcggcaacaggaatatctgaagatttagcacgatatttaaatagaatgaatattccttatagtggtcaaattgctttagtgatagtaacaattatattatcttacataacattagtatttggagaattattcccaaagagaatagcactaaaaaaatcagaagctattgcaatgtttgctgtaaacccaatagtgtatatatctaaaattgcaatcccatttgtaaagctactttcagcatcaactaatatattagttaaactggttggacttgataaagaagatttagatgaaaaagtatcaaaagcagaaattaagtcttttttagaagttggacgagaacatggtgttataaatgaaactgaaacagaaatgatcaacagcatatttgagtttgatgataaattagcagatgaagtaatgacgccaagaacaggagtatatatgattaatatagaaactcctttaaatgaatatttggatgaattaatagaggaacgatactcaagagttcctgtgtatgaagaagatattgataatatcattggtattctttatctgaaagatttttttgctgaatcgaggaagtgtggatttgaaaatgtagacgttagaagtatactacatccaccatattttgttccagaaaataaaaatattgatgaattatttaaagaattacagacttctaaaaaacatatggctgtattaatagatgaatatggaggattttcaggtatagtgtctatagaggatttaattgaagaagttatgggaaatatagatgatgaatatgatgaagatgaaccatgtataaaggccatagataaaaatacatttttaataccagggatgctttcaattagtgattttaatgattattttaatgtacatattgaaagtgaaaattatgatacaatgagtggatttattattgaaagtattggacgtattccagagggcacagatgaaaaaaatatagagtataaaaatttgatttttaagatagaggaagtaaaagaaaagagaattgagaaaataaagctttatattgagagtgaagaatagttttattaaaaataaatagtaaatttaaaaatatttatgtcattaaatattttaagtgggaatgatactttgggacagatttgaaatattatcgcattggagaattggctcatctagctagagttagtactcgaactgtagattactatacaaaaatcggagtaataaaagaaaaggaaagaacaagtggaaaccatcgtttatacattgaagaggcgttaacatggttttacttggtaaatatatacataatgaaagaaattatcttattaaattgcttattttctagaaaaaattacattgtttggcaatataagctatatttatggttttatatatggaattgtaaaggaggaaaatacaatgagtggtttaggaaatcaaattaaaactttgcttttgatgagtgtcctgacgatattagtagtattaataggcagaggtaatggcagtatcaagatctagagaatatcttgcagatagtacaggagctaggattgcaggacacagtagagactatcgaatgcattactaaagttagaacaggcttctagagcgattccaatggacgtcagccctgcagcaagtcatctttttatagtgaatcctctaagtgctaagagattaatgaacctatttagtgctcatccatctacagaggatagagttcgccttgcataggtagtgtaataaataaattctatttttgttattatttttgaaggctatagtttgaaattatggttaatatattgttgtaaagaaatataggcaaaaggaggaataataatatggcatcaaatagtagtggaagaaatacagttttagtaccagaagcaaaacaaggattacaaagattaaaaactgaagcagcttcagaaattggattaagtgattatgaaaacattgataaagggaacctttcttcaagagacaatggtagaattggtggagaaatggtgaaaagaatgatagaaagctacgaacaagagctttaaataatagtgaatgcaccaaatctgcttttggtgcatttatagtatatggctaaatctaggtatattttatagactttgtttgttaaagaatttaaatagacatactaaataaatattaacttcattatacattttaatgttatcctttctgaatagaacttaatataacacctatgatgacaataactcctcctaatatttgtacggtagatacacgttcatgtaagattaatattgaaaatatcaaacctaaaacaggaactagattcataagagaaactgaaatactagcagagagttttcttagtcctaaattatataatagaaatgcaacaatagagcagcctacacttagatagatcaatgcgcttgctgaagtcatggtaggcattctccatgttttaccctcgattatgacaaatggcaaaaagaagatgaagcctgctagcatttgataatatgttaacgtcattgcagaatatttatttgtcaaatctctcgtaataaagttgtagaatgcccatacaattccagctcctattaggattatatttcctaacatagatttagaattgccatctacattaatttgagttagaactgcaacaccaatgatagcgagtataattccaagtaccttttttatatttggctttgaatgataaataaaaaattctagtaatgttgtaacagcaggaaaagaagctactatcaaagcagaatttgaagaagatgtcatactaaccccaatgttttctattgcaaaataaagtgtaatccccaaaaatccacttaatgcaatacgcatacgatcttccttttgtatttgttcattatttgctgtgattttcctcatgaaccaaaagagaatcacagcaaaaagagttctaactgcagcgagttgaataggagcaaaagtttcataagctaattttgttgcaataaaagatgcactccataatacaacagccccagtactagtcaagtaatagtaagataaagttccattttgtatatttgttttttgattatctagtaatgatttggcctttaacatagaaatatatatcccccttttaatttagtgactactattgtaactacttgtgattacaatatcagttttagttgattctgtcaatagatttagttataatattagttactaaagtagcgactaatattattggaggatttatggaagataacattttagaagtattaaaaaatttaaattttacagaatatgaagcaaaagcatacattacattattagaagaatcaccattaacaggctatgcagtagcaaaaaattcaggtgtgccacgttcaaaaatatatgaggttttagatagtcttgctatgcgtggagatattttaattagccatggaaatacacaacagtatgttccaattccagcaaaagaacttattaaaaatcgtcgaataaaagctgaagaaaattttaaacttgcagaaacatcgttagaacaatataatcaatcttcaaagaatcgtgagaatatctggaatataactggtcatgacgaaatacttgataaagtaaaagaatgcatcctctcagcaaaacatagaattttgcttgaactttggaaagaggaattcaaagaattagaatctgaattaaaaaaggcagctgacaaaggagttatggtaaccattattgcttatggagaaatagtagctaattttgcaaatgtttacttacatgatatgagtacagaaattaccgatgaatacggaggacgttggattgtagctagcgctgataattcagaagttgtagcgggtattgtatcactcggtaaagatagcagggcagcgtggacaatgcataaaggattggttatgcctataacagaagtcattattcatgatctgtatattatggaaatcatggagaagcatagagaattattagaagaaagttttggcaaaaatcttattgaacttcgtaagaaattttctatataccaggatttaaaaaaacattatgtataattaatctatgaaatcataatagtttattttggaatgttatattattcaatatgaatttagggcgttttaaaaaatgtttcttgatagtaaattgttgtgtcataattaaagttttcaaggaagaatataagaaggaggaagagttatgtcaaataacgtaaaatagagaagaataattttagatttagcaactactttagatggctttattgaagggaaaaacggagaagttgattggtgcattatggacgctgatatggggttcactaatttcttaaatgaaattgacactattttatatggtagaaaaagttacgatttatggggacaatatattccacaagatgaagattcagatgaagaaaaagaattttggaaattaattcatagtaaagagaaatatgtgttttccagaacacaaatagatgctaataatcaagcaatatttataaatgataatattcttgaagaagtaaataaattgaagaataagcctggtaaagacatttggctatatggaggagcaagtctaattacaacctttataaatttagggcttgttgatgaatttagattatctattcaccctgttattttaggagaaggaaaaccgttgtttagtgatataaaacagagattgaatttaaaaatggttaacgccagaacgttttcttctggcgttgtacaattaatctatcatcggaatggtaattaatttttaacagaactctctgtatcaatagctactccaagcttagctgatattatggtatttaatttattaattgaactagataagctaacaatttgtttctctaaacgaattagtaaataggcagataccgctactggaaagccattattaacaataaggttaattaactcatttacttccataaatccatcacctcctataagggatatatgatataaaacgtattatttcacgttagaaaacaaatagtacataaaactaaaatatatacattgcataaataattcttcatgataattctaaaaatattgcaagaattttagccgtggttttgaaagttgcatcgtgaactgtacattgtgaattgaagtatatatagataaattattgagtgccatcttcatttacaatatggttatgataataacctatggcaatatcaactattgtactgacacatacattaagatctggatggatgctctttaattcatttatttttcttatggtagaacttataagggtgtagctccttttaaggaacctttgatgtttttcttctagccataaattatatactctccttagcagtagttttatgtatcttcgtaaaagatatatggttatttattagagattctaaaattctaaagaattttagaatataaattcttaggaatttaagaattttacaatataagaatatttattctttataacttaagaatataaaaggaaatacgacccacatgtgttctctggatactcacagagtaagcgatcatcatcaaatcacagatttggatgtctgcttaactaattcacaccaaatcgatgttttaagaaatttaaatatagtttataattacagtatagacaatctgttaatttgaatatgcgcgacaaaacaataagttaaaaaataatatcataaaaggaggttttaatatatgatatggaatgaagtaagaaaaacttatcctaataaatggatcgtatttgatggcttaaaacaatatgaggaagataataaattaattgttgaagatttagcaatagtagaagtattttcagatttaaacacagcttataggtattattgcaatcttcataaacaggataaatcacgtaaattaaatattggcgatacgcgtaaagaaaatcttgaatttaaaatcgaaaggatcggattaatgagatgataaatttaaggtatgaacataagttattattttgttccttggacttggatattgataaaaagcccttgcattttgaaaatgtattgatagatactggttcagctaccaccttaataaatagggattatattcattttgatggtaatgaagagcttattaatgtacatggagttggtggttatgaatcagttttaatgaagccttttaaaaatataagcattaataatggctatgctttacatgacgttcttttatgtgttggtgaaatggattatgggattgacattgatttacttattggactagatttattgaaagcacttaatgctgatattagcattaaaaatatgtgtctaaagttttcaaattgttaaatgtcaaaataatatacaattactaaataaataggataaatggaacaacatttttaattaaattgattatattaatattaatattaatattaaaattctaacagctctaaggattaaccttagagctgttatcttgattaataatataatgaaatattattaaggattttcattaaaatgtttttctttttttgaatagcagtagagtagcacatatttttaaaataagcatattcctttacagtgtaatttttatagaatacaaaatctataagttcaacttcatctttatttaaattcttaagggctaattttaaatcctcatagtcgcacatctcacataatgaagtttcagttgagatttcaagttctggaaaatcattttctacatcatcatgtaagcttaatgcataactaccttcagtagatcttctagttctagttcgttttattagatcattcatattatttttaatagcattagtagcataggcaacgaatctatgcttttctaaattatacttggaaacagacttgaaaagtgaatggtaacattcctgtataatatcatggaaattatacctatcaatgaaagtctttttagaaatattataaataaaaggcctaaattcataagctaatttttcttttgcttcttcatcattattcttacatctcgtaactaaagtttcaacataatcaaaatccatataaacctccatcttcaataataagagttatgaactaaagtaattattttacatatattgtgtttgctgctaaatttacctctatatatagtatatatggctaggttacatataacttatataagaaagtaatattaagaaaaaaatttttataaggaaacttagattcataataatatatagcttatgctaaattaggtaggctatcattatttgcttctataatagagttgagttataagcatattaataatagttatgacagatattgcaaatttaagagttatagaatttcattaacctaaatgatttaagtattgatagaaatttgaaagataagtgaaacttcaattatgtctataatgggaagttgaaacgaatatgtaatggttccatttaaatacagtttttaaacaaatcgttgtatcaccaataattaattaagtgtaattgagccaaaactttaatgtaatcgagaacatatattaataaaaaaagttttttaatatttagaacaaattttgcttacgaaagctaatgaaacattgctacaattacgaagcaagtattgcatttgaaaaaataagtaatgtaaaaggagtgattacaatggattggaaaattgagataaataaatcaaaatcaacggctatgactatttaatctatggcagaatacgctattttgattagtttgagtgagaagaagggggaatacgggaatactaaggaaaattagagaacaaattaagctaatattaaattaataagactgagttgaattttactacaattaatattattaaatttttatgtaatccattatttattcggtctaatttatggagggaaactatgaataaaaaaaataaggttgaaaataatcaaggaacaaattttataagtattattgctatattagtagcaagtgcctttgtggcaacttttaatgaaactatacttaatgttgcattatctgcaattatgaaagacatgaatgtatctgctggaactgttcaatggcttattacagcttatatgacagtagcagcagtaatggtacctatcactgcttttcttattcaatcatttaaaacaagaaaattatttttgagtgcaatagtattattgcttattggaacaatatgtgcggcactttcaaattcttttgccatgttattgatttcaagaatgatacaatcagcaggtacaggaatgataataccaattatgatgaataccatattattagtagcaccaaaagaaaaactaggaatatcaatggcaatttgtgtgccagcaattttacttggccctgcatttggcccaacagtatcaggaattgtattacaatattttagttggcatgcgttatttataatgttaataccaattgtatctataattatgattctaggttcactattcgtagtaaatgtaggagaattaactaagcctaagatggattatttatctattattttatcgacaattggagtaggtacaataatatatgctataagcagtataagtgaagggaatattaagataactttaataaattttatagttgggattatttgtttgataatatttataaaacgacaaaatgctttaaaagaaccaatgctaaatttatctccgtttaaatattccaaatttgtaataggaacaattttagtaatgatagcaatgatggttacttttactatgagtataatgttaccaatgtatatggaaggagctcttggaaaaacaagttctgtagcagggttagcattattaccagctgtaatttgcgctggactagcagcacctgtaggagggaaaatttacgataaatttggtgtaaagtttttaataccattaggaacaggaatagtaactgtatttgtatttttaatatctttgtctaaaagtgatacatctttagtgcacctagtaataatctatatatgcatgagcataggagttggactatttatgtctccttctcaaactcatggggtgaatcaattgccaaaagaatattatcctcatggagtagcaatagtaaatacgcttcaacaagtttctgctgctatagggtcatcactttttattggaataatgtcagcagctcaaattaatgcattagaagtgcaccatgcaaccaatgaagttgcaatggcaacaggattttcaactgcaacattggtagtttgtggatttgcatttgttgcattaattttatcttttttctttgggaaaaataaatcagaagtagaagctaaagaacaagtaggatgcacaacgagataagcaaaaaaacagccactagccggtttaatactacaacaataccgtaatataatagttgtttatccgtgcatatagtgggtaaataaggaatcaaatatatgattatagtatgtcatttaagtcacttaaatgaaagaaagcgatatatgaattaaaaaatgtattgtcatttgctattaacacgaagaaatatatcgtaaataaaatataatttctcattattaatataatttagtattaagggagtgtcgcaaaatgattaaaattcaatcgttttgcgacactctcttttttatgtatctgatagttgaattttctaattatacattatagtgaaaatgtttcagtttcaccgttgaaagaataaatagaagctgttcctttagtgaagtataaaacagcaaaaatcccgtcatcaagactgtacatgcgttttaaagatggatatgcttctagtgcaaattcttttacttcgcgtctatcatcatttgcaacttctccagcaacacgaatccattgaccttttttgttcatagtagagatttcaacctttgggttttgtaacatttgcttaaaacaatcttttttgttgttagtaacaatatataatttttcttcatattcaaaaacagcgccaaatggtcttactcttggttgatcaccctcagtagtagctaagtaaaaagtaccactctcttttaaaaattccaatgcttttttcataatgattactccttctatatctgtatgttaaaattgattatgcaataatgataacatgtatagtataaataacaagtacgatttttatagcgtgtaagtatcaattaggatactatatatgtttattccttaatttcagctggaacacttcgggaaacgttatttagctaaattacaataaatgacatagcacatagagttgaagatcctgttattttgtgggaaagagataattgtgtatcagaagcattaaaggaatgcgttgcaaaatttccaattccagatttacaatggattgaggatagattttgggtttggatacattatgaagctacaaaaataggcagaggtgaaattttggagactatagaatttatatcatcactgaggcaaatggtaataggtccattaatattgatgaaaaatggagagctgccaaggggcgttagaaaaatagaatttgttgctccagagagcataagcttattgaaagagactataccatcatatagtattgaaagttgtataaaatcgctaaagatgataatacaaatatatttggaattaagggaatactttataacggaagattttgtaaaacgcctagaagctgaaaaatgttctataaattatttaaataaaataaatcatgagaataagtaatctataaaaactgatgatagaaatataaatattttaatagatataataggaatttaataatttaattattgatgccattttagagattttcaatgttgcatatagaaatatttgtttgagatttcgctcgtttatagtaagaaaataaaatggacaaaaattggagggacatggagcggtatggtctataaatgtccaagatctccaatggaagaccatgatttaaggtttgaagatatagaaaattgtgagaagtgcaaatattttaatggttatgtttacgaatatagaagaaagatgttaataaaatgcatatataggataatatggtttatatagcgtaaaatttttatcaattattataaatatgctgaagtgaaaaaatgtaatattcaaaaggttcaagtgttgataaaaaacaacacctggaccttttattaattgtgaatataaaaattaatcagaaatgtattatctacataattcctccacaattaattagtaaaatcaatgtataaagataagataattaaaggagtgatatatgatgaagaagaaagttgtgattctagtattagcaggcatattaactgtaagtggagtatcacttgcatatgcagcaaatagaaatgatataggtttaaataattatagtggaaaaatgatgagtgcgatgggatctggagctcaatatagtaaggacattaataagatgatagatataatgaaggaaaatggttttactgatgaagcaaaggctatggaaaatagagattttaattctatgaaagagttaatggttaacataagtgaaaaagactatgaaaagatgactaatataatgcaaaataacggatatggttctatggctaagatgatgcaatctataggcaaagaaaatatgggcaagatgcatcaaagtatgatgggaaattagtataattaaatttaagcatgaggtaagagaaaattaatgtatataaatatgaaaatgaaaggatgattgaatatgatgggatatggatataatatgatgggaatttggaatggtatgatgattatacctatacttttaattgcagctattatatatgtaattgctaagcaagaggaaaaaagttatgttaaagtttgcagagttagcgataattcattaaatatattaaaagaaagatttgttcgtggagaaataactgaggatgaattttacagaataaaaaatatattaaataataagcaataataaaattatagtcatgtaaaaagagagacaactaatcctttttttacatgactttttatgtgtagagatttgataataataatctattgtttgtaaaatcattagatttacaataactaatagtctaattctgatgaactaaatttttcaaaatctagattaaaataaaatttggcgaaaaaaattcaaataagctttggggttttaatgtaataatgttacttgtactaacagtctgtttagtgttaatgagcatttatccaattgtcgtgttattatctgtaattttaatatatccctataaatcaattaggagttttctttcgcatgaaaaaagtgctcaaacaaaagataggagtatgggacttatgggacaggttggtctaaaatatcatttggctgtagttattggattaataattgcaattatattttaataaatcatcagaagtttatgttaaataggcttctgcttttttatttaagtagattatttttaacgaatatttcttatagatttatatattgtgatttttttacgtgttttaaaaaaatattaaagctttcatataggttttctacataataactacataaaaacttgataatatttgaacaagaaaaaaatgctaattacttgatagtttttaaagagtatacctcgtctgagaggagcaaagaaattattttacactaaaggttaatttgaaaggagataaaaatgatacaggattatttgattattggaatttttcttatagcttcatttatttttggaatggtcgtcttattaacggcttccttagtaagaccgaagaagtcaaataaagaaaaattatctacttatgagtgtggtgttgaaactactggttcaacgtggattagatttaaggtcagttactttatgtacggcttagtatttctactctttgatgttgaaacagtatttttattgccatgggcagtgaaatttaaatcattaggattattcgcactttttgaaatggttatttttgtaggtattttgatcattggcttatggtatgcgtggaaagagggggcattagagtggaaataaattttaataaagataaagatattcaagaacaaatagaaaaaaatattattttaaccaaattagatgatactttaaactatttccgcgcacattctttttggccattaacctttggcttagcgtgttgtgctattgaaatgatggcagcaggaggtgctcgttatgacattgcacgttttggatatgaagtttttcgtgcttcaccaagacaagcagatttgatgattgttgcaggaacaatcactgaaaaaatggcacctgtagttaaaaagatttatgatcaaatgccagaacctaaatgggtaattgcaatggggagctgtgctactagtggtggaccttttgtagattcctataatgttgttcagggcgcagatacatttttaccagtagatgtttatattccaggatgccctccgcgtccagaagcattaatacatgggcttttaacattaaaagaaaaaattattcatccgaaaggggtggtcacaaatgagtaaaacttgtgaaaatctgatttcagaattaaaaatagagtatgagcaaaatattcaaattataaaaaatacacagattgctatctatatagaattagatatttttatggatgttataaaaaagttaaaagattatgggtttaattttctagttgatctaacagctattgaagaagagagcttaagctgtatttatcactttatgtcactcacaactcatgagctaattagaattattgtaaaacttgatgagaaacttgaaattccttcattgactaaatattggcttgcagcaaatgttcaggaaagggaagcctatgatttattcggaatcaattttattggacacccagatttaaaaaggatattatgtccagatgattttgtaggacatccacttagaaaagattttaaggttgaaaagagaagataggaaggatgaagcttgataatggaacataacagagatttgcataccgaagaaatgactttaaattttggaccacagcatcctagtacccatggtgtatatagagcaatctttactttagatggtgagaatattgtcaatgtagaaaatatcataggctatttgcacagaggtatggaaaagttagctgaatccagaacttatactcaatttataccttatactgatagattagattatttatctggaatgttaaatgagttaggttacgttcaaacagtagagaagcttgctgggattgaagttccagaaagagcagaatacattcgtataataatggctgaattgcagagaatagcaagtcatcaagtttttttaggaagtatggctcttgatttaaatggtcataccccttggatgtatttttttagagatagagaaaaagttttggacttattcgagatggtttgtggttctagaatgacagcgaattatatgcgtattggtggagtaagctacgatgtacctgaagagttcatcccaactttaaaaaattttcttaatgacatgtataagagttttgttgaatatgaacgtatcattacgggtaatgaaatatttcaagctagaactaaaggggttggaataattagtggtgaaaaagctttagcttacggtttaacaggtcctaatcttagagcttctggtattgatttagatttaaggcgtgattcacaatatggtatttatgagcgttttaagtttaaagtaattgtcggaaaagaaggcgactgttatgaaagatggataatgcgtattgatgaaatggaagagagtataaaaataattaaacaggcgctagagcaaataaaagaaggtccagttttagctaaagttccaagactaataaaaccacccaaaggagatatttatcatcaaattgaaggctctaaaggtgcacttggatattacttagtaagtgatgggtctgataaaccttatagaattcacatacatggcccatcttttgttaatataggtgcctttcctgaaatggcgattggaagcactattcaggatgctgttgcaatactcgcatcacttgatcctatattaggcgaaattgataggtagctttggaggtaaaaatggagaatatatttataaatatatctgattggattagaggattaactttggcattgggaataccaaatgcttttgtaagcattgttatgagcttagtttattttattgggattataacttttgttttattaaatgctatgtttttgatttatttagaaagaaagttttgtggttatcttcagcagcgtccagggcctaatagatttgggccacaaggaatatttcaaagtgtagctgacgttgttaagcttctaggtaaagaagatattattccagaaaaaacagataaattagtttttgtaatggcatcattgttagttatggttcctgctttattaatttatgctgtgttaccttttggaaaaaatatggttgctgtaaatttaaatttaggattgctttatttcctggctatatctggagtttcttcaatacctatattaatggcaggttggggatctaataataagtactcacttttaggtggaatgagagtagttgctcaaatgataagttatgagatacctatgattttttctcttcttggagtagttatgataagtggttctttaaacttaacagaaattataacagctcaaaataaagtgtggttcatttttttacaacctgttgcatttattatttatcttattgctgcgactgcagagttaaatagagctccttttgacttagctgaaggtgaacaggaaatagtagccggtccatttacagaatatagcggaatgagatatgctcttttttatcttgcagagtatactaatatgtttgctgtttcagcccttacagctacgttatttttaggtggggccagtggacctatattaacctcttggatttggtttatcttgaaaacttacgtaatagtgttactgcttatgttagttcgatggacttttcctagattcagattagatcatatgatgtctttaaattggaaatatcttattcctatttcattaattaatattttatttacaggaatagggattaaaatatttcagttaatcagttaagaggtgaatttaatgtttggtaaaggattaattaatggtcttagagtaactcttggacatttattcgaaaaaaatataactcagcaatatccagaagaacatccaaagcttccatcacgttctcgttgttcttttaaactggattcagaaaaatgtatttcatgcagcatttgtgctttaagttgcccaaatagagttattaatgtagaaagttataaagatgaaaataaaaaaaagcatttaactaaatatgaaatgaagttagagtattgtctattttgtggtctatgcgttgaaagctgtccaagtaaggcacttcagtttacttcagattttgaattaagtgcttatagtagggctgaaactaagcttaccctatttaataataatcaggagggatcattatgatatcagcttttgttttttggcctattgcatttttaattatagcttttgctataggtgttgttcattcaaaaaatattatccatagtgctttatcaatgattttaacctttataggtatcgctgtggtctttattttacttcaagctgactttttagctttggctcaaatttttatttatgctggtgcaatttcaattttaattgtatttgcaataatgcttactagaaaaagtgatatgaaaaatagtaatccatttaataaattaagatggactggtttaatattttgcttaggattttttgcgattattacgcgtttaattttagttagtaagtttacctataagaatttgaatatggaaaataccattagtgcaatagcagatggattctttggaaattatatgattccatttgaagtttctgcattacttttattaatagcattagtaggctctattattttagcaaaaggagtgaaaaattaaatggttggtttagaaggatatttaatattagcatcagctttgttttgcattggtctttacggagcttttacaaaaagaaatgttatcagtgtattaatgtcaatagaaattatgttgaatgcagccaatattaatttagtagcttttaataggtttttagcaccagaaaaggttacaggacacatttttgctatattcgttattgtagttgcagcagctgaaattgctgtaggtctagctattatcttaaatatttatcgaagtctccctacatctaatgtagaagatttcaatattttaaaatggtaggtgttatgatgaaatttatagatttagcgtggatgattcccatatttcctgcaattgcatttttaattattggatttattacaagaaaatctaaaggggttagttcagcaattgcagtaggtggaatgtttatctctcttgtattttcgttaggtgttttttatgaggttataacttcaaaagttagcattaatcaacccattgaatatgcagttccatggctatcagttccaattaagattgaggtaggagtattaattgatccacttacagcaactatgcttataatcgtgacttttataggtttattagttgaaatatattccttgggttacatgaaaggagaaaagggtttttcaagattttttgcgaatttatctctatttactagctcaatgttaggaatcgtaatttctaataactattttcaaatgttctttttctgggaactcgtagggttatgttcttatcttctaattggtttttactatgacagaccttcagctgtaaaggctaataaaaaggcgtttgtcgcaaacagagttggagatttcggatttttagttggaatgatttgccttttcatggcttttggaacttttaactttagagaactagctgcaagtattccagcatatcaagatgttgtttatttaactataatagcattattaatttttgcaggaccagtagcaaagtcatctcaatttccacttcatgtttggcttccagatgccatggaaggaccaacaccagtaagtgcattgattcatgcagctactatggttgcagctggagtatatcttttagcgcgtggttatatattattttcttctttacatgaagtaagtttagtaattgcgtacattggtggaataactgcattcatggcaggtacaattgcaatagttcaaagagatttaaaaagaatattggctttttcaactatgagtcaattgggatatatggttatggcaatgggagtaggcggatttacttctggaatgtttcatcttacaagccatgcattttttaaggcattattatttttaggtgcaggtagtattattcatgctattggtgtacaagacatttttaaaatgggtggtttaattaaaaagatgaaaatcaccagtattacttttattattgcatctttatcactagctggaattccacctctatcaggctttttcagtaaggatgaaattttatctgtaacttatgaacatggttatgtatttttatactatttaggtttagttacggcatttttaacagctttgtatatgtcacgtttgatttttatagttttctttggtaaagaaaaagaaaaacattatgttcataaaactccttggtgcatgactttgccattaatcgtactatcagttttttcagtgttttatggttttataaatgaaacttttgcttcatttatatactttcaaacatctcaaattcctgaagcaaatttaatggttatgggtgaatcagtagcagctgcatctagtggcatactatttggttggcttatctatggcaaaaaggtgatatcaagtgaagttctaagtataaagtttagaccaatatatcaaattctttttaatcagtattatttaaatgaactttatcaatggatatatgaaaaagtagttttaaatacttcttatttttttaattggtgcgatcgtaacgtagtagatggaatttttgataacacgacttctttcataagcagaataggagataagcttagacttattcattcgggcagagtgcaaaattatgctctaatctttttcatagcaattgctttgataattatttggctcgcagcaccgattttaggagggatgtagatgcaatttccgatattaacatcaatattattagcacccatttttggtataatcataatacttttgcttccagaaagtaagaaaaaggaaataaaggttacagcagcaattgtcacgtttatttcattgttgctttcgattatagcttttgttacttacaataaggaaatgggaggacttcaatttcaagaaacctattcttggatacctgcctttggaattaattattctgttggtgcggatggtttaagcatacctttaatattgcttactgctatcgttatttttgcaggtgttttttcatcatggaaaatggaaaaaagaataaaggaatttttcattttcctgcttttactagttgcaggtgtttttggggtattcatttcaagagatttattttttttctatttattctttgaaatagctgttattccaatgtatatactaattggagtttggggaagtactagaaaagattatgcagcaatgaaactaactttgtatttattagtaggaagtgcatttattctaattgtaattattgtaacttttgtatatgctaacaatttaggagtaagaagttttgatatacaaactcttagtactattgaatatagtgagagctttcaaaaatttgcctttttccttatgttaataggctttggtatattagtacctatgtggccttttcatacatggtctccagacgggcacgtagctgcaccaacagctgtaagcatgcttcacgctggagttttaatgaagcttggtggttatggaattatccgtgtaggtgtgttcttatttccagaaggcgcaaagtactgggttcctttaattgcaatactatctatagctaatatagtatatggagctatggttgctatggctcaaaaggatttgaaatttgtaattggctattcaagtgtaagtcatatggggtatgttctactcggaattgcttcattaaactttgaaggaatagatggagcagtagctcagatgtttgcccatggtattatgacagcattgttctttacgctaataggaaatatttatcatcaggctcatactagagaaatcgctaagtttggtggtttaatacatcaaatgccgatagtagccattggttttataattgctgggtttgcatctttgggacttccagggctaaacaattttgttgctgaatttctaatatttttaggatctcatgatgaaccaagaacattattttcagtaataccttttaaagcaatctcaataatggctattctaggaattgttattactgcggcttatatattaaaggtaattcaaagcacttttcttggtccaagaaaagaagaatgggatcatttagaggatgcaaaaggagtggaaatgatacctatagtgatgctcgcaggtgtattaatattttttggtttattcccttcaccgctaattgaccttattcatagtggagcaatgtcacttatgggtaagatatcagacataggaatgataatgggaggattttaattatgagttatatagttgaacttttaactgcagctttatgtcttttacttttgatagcaagtttatcactgcaaaggtataaagaaaagcttagtttatttacaggaatatgtctatttataattttaatagtatcattatttagtgaggcaatattgaatgggagtcagtcacaatctctttttggtggagtttatattaatgatccttttagtactttttttaaacagcttttcttgatagctgcagtattaacagtgttaatttctagagatcatctagtttcaaaacaaggagagttctatgcattaattgtgtctgcgatacttggaatgatgattatggtatcatcgggagaactcattgcaatatatatagggctagaattaatgactatatcattttgcgttttaattgcttataaaggtgatgataaatcaaaagaagcaagtttaaaataccttatcttaagtgtaatgtcttcagcaattttcttgtatggattaagtttaatatatgggattactcaaacaacggctattaaagaaattgcagaagcactggtgacaggacagatagcaccattagaaatactaggaatgatatttttaattgcaggttttgcttttaaaatagccattgttccttttcatatgtgggctccagacatttatgaaggagcacctacttcgattacagtatttttagcggtagcatctaaaacagcaggtttagcagttttattaagattatttatgactggcatgtcatctgtgtctagctactggattgatttaataatagtattatctgttataactttagtgcttggaaatttagttgctattccccaaactaatattaaaaggctgcttgcttactcaagcatttcacaagcaggttattttttactagggattattgcgaattcaagtcttggcatcgcatcaattttgctttatagtttgttttatctgtttgcaaacatgggagcatttggagttgtaattgcagtttcaaaggcaacaggaagtgatcaaattaaagattatgcttatttagctaaaagatcaccatttttagctgctgttatgcttatttccttactttctttagcaggaattccacctttagcaggatttataggcaagttctatttattcttatctataatagaaaaaggacagatattgttagcgtttttaagtattggtatgagcgttatatcagtatattactatcttaaagttgttaaggttatgtattttggagaaggtcctactaaacttgaatcaattccggtatccataagtacaaaattagcactaactatatctatgacagtacttgttattcttggaatttatcctagccaagtagtaaatgtagtcttgtcagtatctaaagcatttttatcctaatataagaattactaaaaattctattttgtaataatcattatcttcataatttctacataactttaatatataataagaatcattttcaagtgatagatagcaggaaggatgaggaaaatggttgctacaatattaataattgcagttgttgcttttatagtttttagagtattcaaaggcggtggaggatgctgccattaaggatgtactttaaaatggtttttcaatcattttgaagtactttcttttattatgtgctttagcgttaaaagaaaaccacttgctatgcgagtggtgggcggctggttataccgttaaaaaattatgagtattctcaaaagttttatttttagcagaaattttgtgttgtcatcaaactaatactgttaatgcaaaactacaagttattataaaacctaagtttcacaactaaattaaaaatatagaataaccatacaattaaaaaatgtatagcaagtctaacagcgagaaaagactgcactatatattttttagccttacaggcgcagagcaagccacctgttttacgggtggtcctgactaagtgtaacagaatttgaaatttaaaataataagagaacttattggaggaataatttttagttaaattattaaatatatgataaagtaatattaaaattaactatatggggggaaatgttatgaacaacattttaataattgaagatgaaaaaagcgtatcagacgttgtaaaagcatatttagaaagagaaggatatggggtgtattccactgaaaatggattagatggaattgaagtttttagaaaagaaagaattgatcttgtaattttagatttaatgcttccagatattgatggtgaggaagtttgtaagatattaaggaaaatatcagatgtatatatttttatgctaactgctaaaagtacattaagcgataaaattgaaggcttaaatattggagcagatgaatacctaacaaaaccattaagtccaagagaacttactgcgcgtgtaaatgcattgttcagaagagtaagaacaagaaaagaaaatgtactttcttttaataataacaaattaataattgattttgataagagattagttaaattgagtggagaggaagtaagtttaactccaaatgaatttgatatattatatattttagcttcaaatcaaggaaaagtatttacacgggaagcaataatagagagagcttttggattcgaatttgatggttcagatagaagtatagatgttcatatcaaaaatttacgtaagaaaattgaggaagataccaagtctcctcaatatatagttactgttacaaaaattggttataaatttggtgatgaagtatgaagcaaagtattaggggaagactgagttttattataatattctgtgcagtagctaccgtattattatcagctttaattgtaaataaaactataactgatacatttaataggtatatggaaactatacaaactcaaagaaatgaaaggttagtagagtactttcagcaagtttataaaagtaatggtggatggaataaatcatctggagaagagatgatgcatgaagcatatatgagcaattactgcttgactcttttagatgaaaatagaaaaattgtatgggaaatgaatcatgaagatataagagaaaaaaatcatatgacagttaatggtatggaagaaacaggagtatacactactaacacatttgatatcaatgtaaatgataaaacggttggatatatcgaagtagggcaatattcacctgttttattatcacaagaagatattaatttcaaggcacaaattaataaaagtattgtatttagtggagtattaacactaatagtagtagcattgataagtcttattatatcaaaacaattttctgaaccaataaaggaagtttcaaaaacttctgtaagtttatcaaaaggaaattataattctagatcaaatataaaaagtaatattgaagaaattcggaatttaactgagagcataaatgatttaggtgagaaattaaatagtcaggatttattaagaaagcgtcttatttcagatatatctcatgaaattagaactccattaaatgtactacaaaataatttggaagcgatgatagatggaattatacctacaactacagataaacttaacaatctaaatgatgaagtaataagattcggtaagcttttaaataatttgaattcattaaaacaagtagaatcagatgaaatattacttaaattaggaagggttaatataggtaagcttatttcaaatgtaattagtgattttaatattgctgctgatgaaaaaaatataaagttaattattaataaagaagaaggtaaaaattttattgtagtaggcgattacgataaattgaaacaagtatttataaatcttatatctaatgcaattaaatttaacaatattaatggaactgtatgggtcaatattagtagcgatataaactcagttatcattaaaattaaggataatggaattggaattaaaaaagaagatttgccttatgtttttgaaagaatgtatcgtggagataaaagcagacataaaattgaggggagcggaataggtcttacacttgtaaagaagatattaactttacattctggaacaatagatgtagaaagtaaggaaaataaggaaactgtatttacagtatgcataaacaaaagtaattaatacattaatttttatcacaaactacacaaaaaaaggaggtatctataaccactttagaaagtgattttaagataccttttttgttttttgagaatcattttgttgattttttatttccttagaatatagatgatttattatgttttaataataacatataaccaccaatataatttgacagaaatttcatatatcatccttatagaatcttcataactttttattatactttactatataataagtgacttttttctgaaataaaatatttataattataggggtgacaagcgtgaatattataagaaaagttaataaatcaatatataaatgtttaaacaacagaaaatatgtaagattatttgctataggtgcagttattctattacttagtacttttgtatcaagtttttatatgagtgaaaaactaaaacataacttatcagtaaataaagctaatgcctcttacttaaatatagctaaggcatctattgaaaatggggttcaggtggtaagaataacagtagataataatggttatacgcctgatgctatttatgttcaaaaagatattcctgttaagttgatatttgaaggaaatcaacttaattcgtgtaataatggaatagtagtaccatatttcaatatagataaagatttcaaatcaggagaaaatataatagaatttatccccaaagatgaagacatagcgtttagttgctggatgggaatgataaaaggaataattaaaattacagatagcattgagtccataaatgatcccgaaaaaatttaatagaaattcagattttattgtgaaagttatgtaatataatttaagcactaattatatagaggattaaatttatcattataattagattttaattaatgtttaaaatttatttttatctacataatatcttcataaaatttatttataatgtatttacagggaggcgatagtgatgaaaagctatagtttaagttttaaacaagaaaatatgctttgtcataggtgtctaatgaatgttgtaaaaacattaagctcctttcaaggtttattaggagttgatgttagtttagaatcaaagaaaattaaagtaatctatagagataaagagatatcaagagatgatattaaagaaatagtaaatagatcaattttaagtggtaaggtaattaagcttgaacattaattctaatgagagtatgagggggaatttattatgaattgtcatggaaataataaaaatggagaaaataaaaaacataatccaataaagcatatgttaatgatggtactttgttgtggattaccatttataattgtagcagcacttccttttttaaatgttggaacaggacttaaagcagctataggtgggatagcacctttcatatgtccaataatgatggtacttatgatgggaatgatgtttaaaggcaagcatggaggctgttgtagtgaaaagaaagaagttaaggaaaatcaaaacaaaatagagcaataggctaataaaaaagaggttaattagtatcggatgttactattaacttcttttttagttagacaaagaaataaaaaatgaacagttattagtttgtttttttgtataataaaaggtgatttacaaataatagattagatatttaaaatatctaaatattatttgtaatttaaatttaacataatataaaatatatttaataaaagggagttaaagaaaatgagaaaaataacatgggtattggttgttgcagccgctataagattggggataataggttttttgggagatgatttcatagggctcgcctttggttctgcacctgtaacaatgtcttgggtagatagagtagtttgtggcattgttggtatagcagggatatatgcaatttatttattattcaaaggaacgaatagtgaagtagcctagaaggataagaaaagttatacaatcattttaaatatgtttaagcaaaagtaccatagatatgtaaaaggctcaagtgctgtaaaagctaaaacttgggtcttattttatttgaattgattataagaatgttgtagaatagcagatgtaaccaagatagtacgtgataaatagatagcatttagaaattaagattttaatttagaatattaataaaggagaaatccatgtttaatataaatgatgtaatagagatctttagaaataatagctctattgcgatacctataagtttaataataagtataggcatttcccttgttggtatattgccgtcagtatttataacaggagcgaacatagttttcttcgggcctattaatggctttttcatatctctgttaggtgaaacaataggggcatatattacttttattatctatagattaggttttaaaaggaagattgaaaaattcacagatagaaataggttaatttctagaatagttaaaagtgatggaagagaggcggggctactaatatttcaaggaagaataattccatttataccatcaggaattataacacttgccgcatcaataagtaatgttgatagtacaatattcactgttgcaactttgattggaaagattccatctatagccttagaagcacttgttagctatgacataattaatatttatgacaattggataaggctagtcataatagttattggcctaatatttgtgaaatttacaattacaaagaaaaaagattattaagtaaaaatgaattagaataatctcagactagagacttctaattcatttttttattaaagctaattatttatctaaagttttgatataggctttcatttggttgatattcatgccaccaacatgcttagaaactatatttccgtcttcatcgataaagtatgaagtaggaattgaagttatgttatattttgtagctacactttgatcagggtctataagcaccttaaagttatatttgttactatcaataaatgatttaacagtatttaatggctcaccgatttctacagaaactataactaattcactatcctttgtttcttgatataatttttctatatcaggcatttcagctttacagggagggcaccaagttgcccaaaagttaagaaacactttcttgccttttaaatcacttaaagataactcattaccgttcaaatcttttaagctaaaatcaatggctttggttttaatattattaggagttacttcaatagtttgatttgaagtattatttttatcacctgtaattgatatggatgagtcagtttttgaatttgatgattcggaattataaatagtgtaaactgaaaaaactataagtgctattgctacaattgctgctatcaatgcttttttcatatttgttttctccttaatttaaaaattaataaaacttgaatactgacttaatattgctaatttatttgtaaaaatcataatacccattaggaccattaaaataccacttattgtggaaacaataggtaaatactttgagaactttttaaattgttcggcaaagccctctatagccagagctgttagaataaatggaacagcaagtccaattgaatacattataagaagtaaaattcctttgtccatggaatccatatttgcagcataaataagtattgaagataatataggaccaatgcaaggagtccatccagcagcaaacgccattccaataattattgaactaaaaggacccttaattttatcaaagtgtagaaatcttttttcttgataaaatagtttgattttgaaaactccagttgtatgcagaccaaatacaattataagaattccaccaaattttctaaataaatctttatgagtaataaataatttaccaagagaagttactgagacccccattagaataaaaataatcgaaaagcctaacacaaatccaaaggatttatataaagtaaaaagttttgttttaccttcctttaattcttttatagaagagcctgttaaatagcttatatatgcaggaacaagaggaagtacgcatggagataaaaaagataataaacctgctgaaaaagctaataaaatcgatatatctttcaagaataaatcacctcgaatctaaaattaaaacattaaataatgtttaactaaataatgtttaactaaataattgaaccttttaaaagtataatcccgaatatataaaagtcaataattatcataagtaaaattattatataaaaaagatatgaagatattatgtgttctagaattataaaagaatcaagtgaagaaatttatagcactataggaggaatagtcggcatttacaaaaactatgtaaaaagaaatttcaaaggtaattaatattctaatgagaacaaatttaatttgagttaattaaatttagtagtttatgcaatcatacatcatagttcttaataaataaaaaagtgtattgaattctaaaataattagttttcaatacacttttttgtatcttttatgatttatacttttaaaaatttaattaaagaccaggagcttcctacacttccaattaaaagtccaactaatataaactgccattgaagggtttgcgtaatataagatggcgataataagtttattaaaagtaaattttcatttatctttataaaaactagtttatagagatagtatattaagatattggaacatactgctccaaacaaaccaataagtgcaccttcaataataaggggccatcttataaaccaatcagttgctccaacaaatttcattattccaatttctctacgtcttgagtaaatagctaattttatagtattactaataaggaatatagaaactgataccattaatatgaataaagcaattccaatccatttcacgttttgggatattgaaattattttatttgtaaattcctgatcattgccaatggattctataccaggcatattttcgattgcgcttatcacttgatgtgatacttcaggattttccagatctattataaatgaattaggtaaagggttattggaagaatcataattatttaataaagaactattatcttcagaaacttgtttattaaatttttctaaagcctctgatttatcttcaaatttaacacttttgataccagaaatattatttaacttttgcgctaagttttcttgatctttattagtaatgctattatttaaaaatacttgtatttgaacctgcgattcaacattgctcattcctatatttatattttgcattaatagtattgaaactcccattataaataaagttgcggtcactgtaataactgatgctatactaatggttctatttctatttaaactctttaatgcatcaataatataatatttgaaagtattaatattcattatcgtaagtccccctaatttcatctcttattatagttccattctcaatagcaataactcgctttctcattgaatcaacgatatctcttgcatgagtagccataagtattgtagtaccgtttttattaacattgtcgagcgtgtccataattcccattgcagtttcaggatcgagatttcctgttggttcatcggcaattaaaatattaggatcattcactatagctcgagcaattgaaactctttgctgttcaccgcctgacaattggcttggaaacgacctaaatttatcagataatccaactactgataaagccataggtaccttcttttttatacctttattactgacaccaataacccttaatgcaaaagctacattttcatagacattaagagttggaattagtttaaaatcttgaaatattacacctatatttcttctgtaaaacggtatttgattcttatttagattggttacatcagtatcatttaatattaacttaccatgtgtaggctcaatttctttaaaaagcatttttattattgttgatttaccagcaccgcttgagcctactaaaaaagcaaaattacctttttctatagttaagttaacatttttaagagccaaggtgttattgtcatatactttagtaacgtctacaaatttaatcattagtaatcctccaattagatgttagttaaatatacttgtgtatttttgtaatattataacttattattatgaagaaattatgtgtttccttatggtaatgtattcctttatatgaatctacataatttctacacaattttagtgtattataggattgtatttacaaaagagagacaagtattactctataaataaaagagaatatactctataaataagggagcgatataagtgaaaaaaacaattaaaacggttatgcttgcaacagcattagtgatgattactcaagtttcagcatttgctgaaccaacatctaatcaagcacaaactcaattagaacaaaataaaaattctttaaaggaagtacaagataaacgacaccagcttgaagcaagcattgaagagttggataatcaaattgaagattatatgatgaagattgaagcaaataagaagaacataactgcagcagaaaacgatatccaaacaacaaaaaagcaaattactcaggttgaaaaagaagtagaagctaagcaagatgtattagatcaaagagtaagagctatgtacataaatgggcagtctaactatctaaaaatcttattggaatctgaaagtttcagtgatttaataacaagagctgaagcaattagaaaaataattggacttgataaacaagtaataagtgatttaaatgataagaagtcagaagtagaaagtaaaaaaacatctcttgaagttaagtataatgatttgcttgcattaaaaagcgaaaatgaagacaagcttacaagtctaaatacaaatatagaagatcaaaagaagcttattcaagaggctaaagatcaggaaaaattatttgcatcaaaagtagatgaatctcaagcgcaagtaaatgcaactatgaatcaagtaaataaaataagaaatgaagcacctagagttactaatgcatcgagaggagcaaaatctgcacccgtttctgacaataacataatagcatatgcttcaaatttcttaggaaccccttacctgtggggaggaacaagtccttctacaggatttgattgttctggttttacacaatatgtatatgcacactttggtattagccttgggagaacaacttatgaccaaataaatgatggttatggagtttcaagagatgcactgcaacccggtgatcttgtattctttggtaagaatggtgatcctactcacatgggtatgtatgttggtaataatacatatattcatgcgccgagaacaggtgatgtgataaaaatatcatcaatgagcagacctgattatatcacagctagaagagttaaataatttttaaagggtagaactatatattttaagattaaaatatagtaattggaggtgtcaactatggttgttgaagtagcaataacggtagtagtagttttgtttgttgcacatataatttatcgtaaagttataaaaaaatcttcagggggatgcttttgtaataaagatggaaagtctgagaaaaagtgcagtaaatagttttatagttattttgccttagctacgtgtatattctaatttgtgcaaggataattaatgaattgttttagtgtctgaactagaggtgaattaaatattatgaatttaaagagctctaataaaactttggtttttatttgagctcttattatattttaagtactatctactacatatggtaatgataaagtttggattaaatctaacaagtaaggaatcaactggcattttggtttttaaaaaattatcttcataatttctacacatattctttgtatactctcataagaacagtaattcgattatataaaaattaaaataaataattatactaaaagattagattattgagaggtggtgaggtcatgtcaaattttataaaagctaaaaatgctgtgagtaaagagctttgtgaagttgagatgattttaaaaaatattggaaaagattttagttcgggttcaactcaagagatatttgaatatttttttaaggttccaggaaaatatcttcgtccaagccttgtaatactttcagctaaagctataaatcctaaaatgactatagatgagagaatacaattaattaatttatgtgtagcaattgagctaatacatagtgctagtttggtacatgacgatataattgacaatgatttattccgccgtggtcaaaagacgttaaacaatatatatggtaggaaggtagctgttctggcaggggatgccttttatgctaaagcattttcaatattattaaaactaccaacgaatgatgctgaagaaataattacacaagttattgaaaaaatgtgtattgcagaaatagaacaagctcagaatcatgaaattgcaaagcaggattattttaacataatagaaggtaaaactgcatcatttatggctgcctgctgtaaacttggagcaaaaacagttaaagcaaaagaagaagaaattactgctttggaaaattacggcctaaatttaggaatggtatatcaaattattgatgattacacagatggtgattctaatgcatctaaaaacaatataacggctgaaaatgctaaagagtttgctttaaaagctgaacaagcaattaagaatttagagccttcagtttataaggataacttgaatagtcttttaaattatgtacttgaatcttcaaacaagaaaacaaaaaatgcttaatattaaattcataataaatatcacaagggagatgacattaaaatgagagtttttagaaataaatatttagttcctgtgtggacaattttgcgtatatggctgggttatcaatggatagttcctggtatagagaaattgcaagatccaacatgggtaggaagtcaggcaggtgttgcgataacaggatttttaaagggctctttagctaaagcaactggagaacatccatctgtacagtggtggtatgcaagatttgttgaaagtgttgctctgccaaatgcaggagtgttcacgtatgtagttccagtcggagaacttctagttggcattagtttaatacttggagcttttactatagcaggtttgattggtggagcatttatgaatttaaattacttattagcaggaactactagcactaatccaattttatatactgtagctataattttaatggcagctggagcaaacgcttataaaatagggattgatcagttaattgtatccttttggaaaaagaaatatggcaaacaataaatatagcataaataattaaaatataacaaaaaaagaaaacaagtctttggatgtgataatgaagggagtcaataaacaatgaaaaagaaaacaattagaggtgcaatattaagtttaattcttacgttaggtctttcaacagcagcttttgctgatggcatggctaacatggacatgggaaaaggaacagaaaaaagtgctaatggtataaatgctgaactaacttttaataaagataacaaagtaaaaacaggtgataatgatgtaatgatcacattacatgatgagaatgataaagaaattgaaaatgctgatgttaagataagtgcagaaatggataagaactctgatatggacatggatatgaatggcaaaaaaccaattgaggtatcattagaaaatagtaaagatggtcaatacatgggaaaaattaattttactgataaaggtaaatgggttgtaactgctaacattatggtgaatggagaacaaagggatgtacagtttgatgctgatgtggttagtggcggaccaaactgggtagttataggtggatttgtaggaatagtggcagtaataattatagtagctgctgtgaagaaaaaaagcaataagtaaagcaaaagaatagaggtgactgtttaatgtcgaaattggacaagaaacttagtgatgaaacaaagtcatcacaagatcaaacagaaagtaatttattaaacaataaacttattaagagctttatcaaaagtaagtggtatccaggaatatttcagttatttgttggaatagtatttgcattcattgtgtttgaattattaactggacctgacgaagctcacgataactttggtacagcaggaacatgggtattatggtggcctattcttcctatactattatttttgacaggtagattttggtgtgctatatgtccatttggagcattaagtgatgtggtacaaaaatttgtaggaagcaaaaagccagtacctaagtttttgaaaaaatatggagtatggcttatagatgcaatgttcttagcaattacatggagtgaccatgtatttggagttgttgaatctccaaggggatctggaacattactcctacttattacaattggtgtaatattctcaggtgcattttgggaacgtagaacctggtgtagatatctatgtttcttaggaggattatctggaaattactctagagcaggtatactgcaattacgaggaacaaaagatatttgcgctaaatgtacagctgctaattgttataaaggaactgaaagggcagaagggtgtcctatgtttgaattccctaaaacaatggaagataattcagaatgtaatttctgtggtaattgtgtaaagaattgtcctaacaattcaattaatatatcattgcgtgttcctacaaaagaattatggtttataagaaaaccaagattagatgcagcatttttagcggttgtaattatgggtatagtatttgtacaaaacattacaatgttagaaatatgggatggaatgctcacatggcttgaaaatgtaactggaacacaaaattacgctgttacttttacaataacattcattatagctatggctatacctgtagcactattagcgataacaggattagttgcaaaaacatttaataaagcttctttaaaagaaaatttcacgaagtatggatatgcgctcataccattagatatggctgcacatatagcacataatttattccacttattagcagaaggaaaatctgtattctatacatttatagaactatttggggctaacgttcagcatacttcttcagctattttagatgatccgacaattcaagcgcttcaattcatattgatagcaataggaactcttggttcaatctatactgtatataaaatatctaagaataattatgaagctaaaaaagttagcacaacaatagtgtatactgttcttttaatactacttgcagtagttaatataatgttattctcattacctatggcaatgcgtatgtaataattctttatagcttatctaaaaattattttagataagctataatattatttttcttgcatcttataagaagaataaattaatacaaatgaagaaagattagttgatagaggtgattaaaagaaaatgacaattgaaaaaattaagttatttatcagagcttcaagacctttttctttaacagcttcagcaattccagttgtgcttgggggaatattagcattaaaagagcctaattttaatcttgaatattttatattttcaatcatagcaattgtttttctgcaagcttcagttaatttattaaatgatcatgatgattttataaataaagttgatacaaaggagtctcatagttctagcggagtagttgtcgaaggattgctgactttaaaagaagtttatagaagtggtattctattacttattttaggatgtttaattggtttatttttagcttacaatgtaggcattatgattctcattttagggattgttggagctttatgtggatatttttatacaggaaaaccgttaatgctcaaatatagaggattaggtgcacctttagtatttataatttttggaccattgatgacacttggagggtattatttgcagatgcaggagtttaccgtgcagtcgtttttaatatcaatcccaacagcacttcttactactgcaatattgcatgctaatgatattagggatataaatcatgataagaaagctggcattaaaacactgtcaataagtataggctataagaatgcacaaaaagtatattcaagcttgattatactttcatatatttctcttatcataatgattgtttttaaatatattccttatttaagtttaatttgtttattaacagtaccagctgctattaaaaacattaataaattaagaacagctggagattcaagtagtaatatcgcagaacttgataaagaaagtggaaagcttcaaggtcaatttggaattcttttaattttatctatacttttatcttatatccggtagttaactgccactaattcaccatccatttttgatggattggtggcactaagcgcctggactaggtgcccattgaggttataagttcaactaagattcagagctaaggtttaaacctcacctgaatcacgtttcatttaattttatagaaaggtggcaatgttttggagaaacaaaaaagtaagaataagatcattatttcttcgttaattatgtctacaatattgtggtttgtaatatttgtattaaaaccatttaatttttggattgaaatgggagtatccatattagcgttagtaatggtagctttgttttctgaaaagaacttaatttcatttagaaatataaagttaaggcacatattaatcggaattatttcagcaataatattgtactttgttttttatgctggaaatataatttcaggatatttatttccatttaaagatgctcaaatcgcatcagtttatagcaatagagcacaaggaaattcattacttattggagctctattattattcataataggtccaggagaagaaatatattggcgaggatttatacaaaacaatcttgcaaaaaaatttggtgaagataaaggatatatatttgcaactctattgtacgctggtgttcatataattacatttaactttatgcttgtggtagctgctttagtatgtggaatatattggggatggatttataaaaaagaaaaaagccttgttccaataataatatctcatgcaatttgggattttactgtatttgttttgtttccactaatgtaataatatatatggaaattaaaaatagtaattaaaaagcttaattataagaaatataattaatttaaatatttattaggttttataagcgtaaaataaaagaatgtgtggtggttataatggcagaaattaatataacagatgtggaaaagattttttcagttattgcaaaaagatatgatatgctaaattcaatattaacattaaatattgatagattatggagaagaaaagcaataaaaatatgtaatattaaggaggggcatcaagtattagatttgtgctgcggtacaggacaaatgattaattacgaatgtaaggcagttggaaaaaatacaactgttattggtgtagattttagccaagaaatgcttaacgttggagcgaaaagattaaatcaatcattaaagaattataagtatgaattaatcaaaggcagtattttagaattaccctttgaagaaaatacttttgactgcatcacaattgcttttggattaagaaatattccagataaaaacaaagcattatcagaaatgtatagagttttaaaaccaggagggaaagtggtatgcttagagctttctaaattgaatatacctattttaaaaaatatatacaacctatatttcaattatgtgttaccagcggtaggatcaataggtacaggtgataaaaaggcatactattatcttagagattcagtaaataattttatgaataaaaagcagcttaaggaaacgcttgagaaaataggttttaaaaattcagaatataaatctttaacttttggaattgcatctatacattatggaactaaacaaaaatctaataatatataaaacataaaaagatataggcgcattttgcgcctatatcttttgtattttttgttcccctaatttttataagttatgccgtttggagttttacccacaggaataatggcaattactttattttttgagttatctataacacttactgtattatcatacatatttgttacataaacatatttattatcatcacttacaacaattccatgagcaccatgtcctacttcaattgttgcaactacttcttttgtagataagtcaatttttgaaagtgtatttgaaggattactttctgttccttgatttgctacaaatgcaaacttattatctttttggatatatacttgagcaggtccttcacctacagcaactttttgaacttcattagtagcaagatctacaaaagctagtgaattttctgaatttaaagtagcgagtagcatagtattatcttcagttatcgctgttgttatagggttattaccaacttgtattgtttttatttctttaagttcatttatatctataacgctaattgtatctgattctgaatttgcaatgtatgcatacttactgtcgcttgaaattctaaagccatgtggcccttttccagtatcaattgtctttataactttagaagtacttaaatctataactgatacgttatttttgtctgaatctgtagctagtacatatttaccatcgtttgtgaaaacaacatgtgcaggatgatttcctacatttactttcgtaattaactcattagtttctgcgttataaaataaaacatatccatgaccatgaacagaaccaccatcatcatgaccatctgctttaggaactaaagttgctgctaaaatcttgttatctggtgatatttgaacattatgtacttgtcctgttacgcttattgtagctaaaactttgtttgttactgcatctagtctagagatacttccatcttcatttgcagtaaaataataagacgaattatttgaagcaccttcactagttgagtcattttctacaactatagaacttgaaacttcttcttcttcactgtgatcagaaccgccaccatgactatgtccaccagcttctggcatattctcggctatgttttttaatgaaaagcttaaagaaaataataaggatagaacaattataaataaaggtattgccttctttgcacttagttttatgctgttcttaaataaaaagccaatcaaagaaatcaaaattccacctggaattaggtatcctgcataatctaaaacatcttcaaaatgttgaattccaccactaatcattcctattcctacagaaagtaataatgaaaatacaacaagtctaattgtactcattatagataaatctttcttatctataactgtttcatttaataatgaagctattacaaatactcccatgcctatagatagtacaattaaatttttccttggatctagaggcatatgaacaattcctccagaaattaaccccattcctaaaaagaacattacatatactagatacggaaagagtgcttctttccaagtttcttttattagttttttcattaaaggtcctcctcatttgtgcattatatatttcctaaccaaaccattttacaaaaaagatgtgtagaaaatgtgaagaaattagtagtgaaaatcattttcagctgaaatactaatcgcaactataaactaatgcttaaaatagtccattttattacgcactttagcggatttaatataattattgcttactatatattatgggaaaattcttatagatttttataggcagtaaggaaatatatttatcctaaatgatgacaaaatatgtttttcaatcatactatatgtattgcagaagtttcaggaggaaaataatgaataacacattagaaaattgtccaattacattaaacactacaagaatttgtagcactgaccctatagatgcagctatagaaatatctaaaattggctttactagtatgaaacctaatgctgtcatactagttaataaaaatgatgtttttgacgcaatagcagctacatcattaatccattttccaattaatgcatcccttttattcactgatggcaacagtttaaatagggaaacgttaaaggaaattcaaagattatcgccaaagggctataaaggaattcaagtaattttagtcggtaatatttcgaaaaatgtatcttcagaactaaatgattatggatttagaacacagcatattttaggtcgaaaccattatgaaacggcatgtactatatctaaagtaaggaaagaatttaaaaatattcttataatgtctggtgaagagtactctgaaggaattatttctggctattggtcagcacatcatggagatcctattttatttgtacaaagaaatagaattccagaatgtgtacttgaagtgatcaaaaagatggacgatgtcaatatttatataataggctctactaagacgatatcaaataactttgaaaaatatttttcacaacttgataatgttaagcaagtagatagaatatatggagataatccttacgagatagcagtaaattttgctaaatacaaagattctaaaactgaatttggatggggaagaaattataaagaagggcatgcttttacatttggagtgcttaaagagccaatggagattgtagctggtgtattatttgctcatatgggtaaacatactccgcctcttttaatagaaaaagatagagtacctgaaatagtaaaaagatatattaaatcagttaaacctacgccacccccaaatatgcctaagcccccatttatgcatgggtatattttaggatctgctcagaatatcagctataaagaacaagtaatgattgaacaaatgctttctattgatcatgaaatgatggatatggatgagcacatgatggagatgaaccatgagacacctgatatgtatgatgaaaagatgggtagtgatgatgatatgaataagatgatgagcatgcaccataaaatgatgtatatatatgatgaagatactatgaaacatgaacatttcatgcatcacatgaacaatgataatgatgaaggagatgacaagaattatgaagaaaagccgtgtggttgtaaaaaggaaattaataggaataacagttttgaatcctcaaatattaagtatagattagttagtatagatgatatattaggataaaagggtaatattaaatagcagaaataatataaaggcagctagctattagccgcctctatttattctataggaaattatattattggacaatctgtggataactaataaaatatagatattatgatgaaagagaaaataacagtaagagatatattaaatgataactataatgattttaaaaataaatattggaataaggtaccgaaagatatgcgaaagcatattgatgaagccgtaagtaaggctttaaagtgtagtgatattaaatatggttttgcagaatataaatgtgaaacatgtggagaaagtacaaaagttccgtttacatgtaaaagtaaattttgtaatagatgcggtagattgtatacaatgaaatgggctgaaaaacaaagacaaaacatgctaagagttgtacatcgacacagtgtatttacactaccgaaggaactaagaaattatttttattccaagagagaattattaaaggaattacaagatagtgtaaatgaggtaattaagtattggtacaataaaaagaaaggctcgaactatgaagttggagtgattgcagtaattcatacttttggcggagatttaaaatggaatccgcatgtgcacgctttagtaactgaaggtgcagttgataaaaaaacaaagtggtggaagcaagttgagtatattccatatccatatttgaaaaaatcatggcagaaagttctattagaaataataaaaaagcatttcaattcttataagacaagacaattaataagttatctatacaaaaaatacccgaaaggtttctatgtgaatgctaaaagaaaattagatgatacaagacaagctataaaatatataggcagataccttgcccgagctgcgatagcagagtataggataattaaatatgaaagtaatagagtgaaattttggtatgaagatcataatgatggtcttaaaaaagttattgagtgcgatgctttgcaattcataggaaaaataacacaacatataacacctaaaggatttaggatggtgcgaagatatagtgtttattcaagaataaacaataaactagcaaaacatattgttcatctttataattttgtgaaacaaagaaatattgatgaattattaaaagaaaagaataaacaaaatgaaattaagaaatcatggaaacaaagaattatagagagttttgaaagaaatccattattatgcagtaaatgtggaactgaaaaatttttatggaaaatatggcataaggaatatggggtgatatatgatataagggagacgagtaacagaaaggatatattatatgaacccaaaagagataaagtacatagaaaagttttacaaatatcattgttataaatgtaattacagtgaattcgctcccgcggacatcgtagatgagtttgctgatatggatgaatattgtgatggagaatacagttcagaacaagaatgtaaaagaaagggaatgccagtaatggagtgccctaattgtaatgcggatttttattattcgggagaaacgaaaacagaagaaggctcatattggattgatgaggatgaaccttatccattttaaaattcacaaaactcatagtccccgctaggggatttttttaatgtctaggaaagtataaaaattccgaacgctgaaagcgacttgtagacttgtattgagaagctatatgtggtaaattgatgaaatgattaagagtaaattaagaagaatattagaagaaaattggaacgaattttataaaaaatatagaaatagaataagacctaatgtcattgcagaaataaaaaaagttatgaaatgcaaagatataaataatggctatattgaattaaaatgtcatgattgtggtgaaataaagaaagttggttttacatgtaaaagtagattctgtacatcatgcggtaagatttatgttgataattgggttaacggaatgctaggaaaattaataaatgtaaagcataggcacatggtgtttacaattccggaggagcttagaaattattttggaagagaaagagatagattgaggttacttccgcaatgtgcagctaaagctgttacgagttggatgagtgatcaaaataaaaaagaagaatttatccctggaattatatcagtgatacatacttttggccgggatttaaagtggaatcctcatgtacatatgatggttacagaaggtggaaagggaaaagtaacgatatggagaaattttaaatatttctcatatgaagcattacgaaagagatggcaaaaaatattactagatgcaataataaaaagagaaggaaataaagatagttttagacgattaaagaacaagatatataaaaataataaagaaggattttatgttcatgctaaaaatgaaataaaatcggcaaagatagcagcaaaatatatagggagatatgttggccgtcctgcgatagcagaatcaagaatacttgcgtatgatggtaaaagagtaacctttaaatataaaagacacgaggataacaaagaagtaatagaaaaagtgcccgtgtttgagtttataaaaaaagtcataatacatataccagacaaaaactttaaaatggtgagatactttgggctatattcaaggagaagtaaggataaagatcaatttattaagatgatagataaaaaaatagtacaaattaaaaaatccatagaaaggtgggaatataggattcttgcctcttttggtgtagatccgtgtaaatgtcctaaatgtggaagtaaaatgaaatttaacgatatagtgtatccacgatacggctcgatgcgagaatattttaaaaagaaatttataaatgaaggtaaagaaaagttagaaaacattctggaaatatatgcaattgcaaaaggagttctatatggtaaaataaagccgacaacaacatagttggagggatactaagtgaaagacattgtatcatataaatgtttaaaatgtggaataacagaaaatatacctaaggaggttgtagaatactttgatgagatggatcaaagtaacatagatgaaccgccttgtttttcatgcgaaaaatgtggcggtactatgagaccaaaagaatacgatggggtatatgggaaaaaatataagttgtgataagagaaccatagagaaaatgcaatctctatggtttttgctttaattattaaaaatttctccgaaggagcgtggcgcagccactttgttctgttgcaactttttccttggctatgaagttcattataatatcgatgaatatcaatagattctaatttatctaagcctatatgagatatggagcagttttcaaaatacttagcataaatacctgcatattttgaaaaagatgaagctttaatatttcaagacatttttactactccaaataaccagcttttcatagcctgagaaaaccaaagtgttttatcttggagtcccatgctggatctatttaaataatctcgattcttttttgtttttgccaacgaattgctttctaattcttttaccattggaatctatctctatatcacaagttatccagtaatattcttttccattaggactaaagttagtttttacagccatgagataatcctttctaataagtatctttttgataatatatcaagtcttttgattaaatttaagtatgagtttgataccatacttttcttgggcactttaaaaatttactaaggcctatttactatgtttatttatattgagatggtataataatattaagtaaaagctctatgattaaagagataaaatatataaaaaacatctttagataggaggtgcattggtgaaacaaataaattatgaagatatgataatgaagcccgactcaatgcactcgctgggtaagttcgaataaccaaatataaaaattggattctcacttaagagcaatggatatatttccagaagaaggtttgaaattttttggtatagataaaaaagtaaaagatactggatctactgaaattgttgtccttgagataaagaatatgctaatggattacactttcctaatggaagatgatacttatattcattttgaatttcaaactactaacaagggaattgaagatttaagaaggtttagaacctatgaatctctccttaattttcaaactggtaaagatgttgtgacatacgttgtttattcaggagatataaaagatcctataagtgaatacaatagtgggataaattcttataaagtcaatgcaatatcaatggctaataaggatggagatgcaatctttaatgatataataaataaaataaatgataaagaagaactaagcaagcaggatattatatctttaacatttacaccaataatgggtgggaagcttagtaaaagtgataagataataaatgcaattagagtagttaaagatatagataaagattacagatatgatgtagagtcaatcctatatgcttttgcaagtaaatttttagaaggtaaagataagtaaaggaaatccgactcgtatgcactcgctggataagttcgaagtacaaaatcatagattttagttctcacttaagggaggagataaaaatgaccgaattaggtagaagttttataaaagagggaaaattggaaggaaagcaagaaaattcaatagaaattgcaaaaagagctattaaggaaggaataagtgatgaacttattagtaaactcacagaattaacaattgaacaaattaaaataataagaaaaactattgaaactaattagtattgcaagggaaagtatatgactgaattaagtactatgttaagggaagatggttatagacaaggattcgagcaaggtgaattaaaaaaatcaatagaggttgcgaagagagccataagtcaaggtatgagtgacgaactgattagtgagttggttggtctatctaaaagagagattaaaataataagaatagctattcaaactaataaaacaaattgaataaagttataaaaaggaagatattaatatactttaagcaatagataatgtacgagataaagaacctcttaactaagttttttgggttcgcgtatattatactcagcttaaagtaattaatatctttttattttaactcgccagggctcagacaaaggaagagaagtacaagctaatgcgtatattagaataaaatatattataaatgtttattggtgcatttagaaattatatattttgtttttatagcttgcacttctcgttgttttgttgtagcctgcggcagcaaggaatgaatttataaagagcacttggtgctctttttggctacgccaatttatatgagtatatttgatataagtttttatagtttttattatgtattgttatatatgatgttataggtatatacgttattactagtatatactttactatttatatattttatttgggcgctttatccatcacccaaaaaaggacaggtcatcagcaagaaattctagacttatatgagttttacgacaagctgcaacctcatataagtcaataatttctaagcattagactagtcctttatttgggtacccgatggagcgcaagaaggcaagtacacttcgctaagataagtcgttgtcccgagaatgtccaagctaaaatattaaaggtcataaatttttatggtatctttgtttttataaagatttcaaaatagggaggcttattcattaatttcggctgagacacttcgggaaactttatttagctaaatgtacatgccttctttcttgtaatagggttttatgctgcagatgttagagaagtgttactagagttttttgcacattatgcaaatggagataatgctgaatgtgcagataagagtttttattgaaatgtgaggatgagaagagaaagttaatgtttttcttttcaaagaggatcctttaaatttacttctaaattctaactccagaaagagtcaatatgtaataccaaggagctttgctccactggaattacattgacactttcttcagcagttaatttagatgcagtgataggattaaaggctgcgccttaaatcctatgaaacatagaaagcatatggatatagattattctaacgattatggaaaggtcctattggtttattacatgatttatggggaagtgatgcatacgcataaagaaatgggcgccttggacttgccctcacaatatagagataggatttattgaaaggtgatggcatgtacattgacggcgcccagtgaaataaaagccttcgaaataaaaattatgttgatgcgtagtctgtagaaattgtgtattaacataagaatttaatgaagaaagtacaatcaataaaaactataagtcaatggactaaagaatttgaagataaatatgatagaattttagtctaggagaaatattagtcttgtttttgtgaaaaattgcaataataaggaggcaattacaattgtttggtgaattgaaatataaatggtattaacttgctatgataatatttttttaaggaggtactataaatatgtatgaattcttagatatgaatttaacttatgagagtttagatgaatttcaaaaatttaaagctaattggttagaagaagcggattattatgctattgttagtaaagttaattattggagattgattaatgggaaggttcataaaactgaacttattaaagggaaagatttatttgattttgataaacaagaaataattcaattagtaaagtatttaccaacaaaaagcattaggacaaaacgacaattatatgctgtaatattaaaatatatggaatgggcatgtttaaaaggttataactatgttggtaatccatgtgatactatagttaccaaagaactatatactataaatgaaaaggcatttaaagaacaatatatagaaaaagatgagttcattaactttgtgtatggtttggaatgttcagacgtagatagagccatgttaactcttttaagatatggtgtaaaaaaagatgaagtgggcaaggttaaatggactgatattaatgtagatggtaaatttcttggaatacaacgtggtgataaagaattaaaattacctatagacggaattttcatgatgatgatggataaagctaaaaattgtcattatcgtaaatggtcaaaagataagctaaatatgaaagagaagacagaagtcaaaattttaagctacagaaacagtgaatatatagtaaaaccattagaaagtgttgaatgggacttcatggatggtaatacagtatataatagaattcaaagaatatctgagtctaacaaaattcaaagaataagtgtgccagatttaatcagttcaagaaagtatgatttattatttgaactattagatgaaactggagaagtaaatacaaaaagtattgataaagtgttattacagttagaaggaatttctaatcatagtcgaagaaacagattagaaaaaaattttgagttattaagtggtataaaagttaaagatagaaggactgtcggtaatcgtaaaaaacgagatgaaatagaattaaaattaaatgaaaattttatagataaagaagaaagtaattatcaaaatgatattattaaagctttaaaaaataatgaacgtgatgacatgtctaattatgaatatagacatgaaaataaaaagcaaaaatcagaagatgaggatagaagaaaaatatatgttagagatgctagaattggaaaaagagcattacagttagcgaattttcaatgtgaattggatagtgaacatgaaacattcatttctaatacaaattcggagaattatgttgaagcacatcatcttattccaataaaatattattatagtgatgaatttaagtatagtatagataatgaggcaaatatagttgcattatgcccaaattgtcacaggaaactacattttggacaaccagaagttaagatggaattattagaaaaattatataatgaaaatataaagaatttagaaaaggcgaagatatatattacgttagacaggttattagaaatgtatgttgaatgctcaaaagatggtggaacagattaaataaatatagttaatataaaaaggatgggagagggggcaacctgctactacagggtgtagatcgagaaaattatatattgtcatactactgccacaatactttagtaatatataaatataaagtagttaaaatattatttaccccttattaaataaatattaaacagtattgagaatggtctattacaccctagtagatcattcttttgtatttacagagctagatggtttatggtatatggaagtaccaataaggaaattttaaacaagctacattaataaaatttatatacacctcacattgaaactattatccaatatgaggtgtattttatattgtctaagtttaattattggaactaagagatttacatctattcgaaaaatatacataaatgagttatatagtaaagaagattgagattacaataaaaaattatggtgtaaaaatggtgtaaaataaataataaaaacatcaagattttaaatacttaaaaccttgatgttttctaacttggtgacccataggagaatcgaactcctgatttcaccgtgagagggtggcgtcttaaccgcttgaccaatgggcctcacaacaaatattattctacacccatttatttattatgtcaacaacttttttgaatatatccgtaaaaaaggaaagagttagagaagagtgcttaaaatgtaaaaatgatttgttacattttatacaaatcataattttctaaatatttaaaaaacatacttgtttttcggtgaaaatctgttaaactattatatagttagtaatttaaatagaggtgtatattgtaaaatatactcatcgctcctcttgtatgattttttgatcatacggaattacgactcctttttaatattttgtgggatatccattgagattttattgtttatgaacagtttaattttgatgggtattattttttatgataaattactatactttataataaatttatatttaaagcttaagtaaaacaaatgttcaaataatacaagaatgcagaaaattaattgaaagttatgttaactaataattttaaaagcaaaaagaggattgtcaaaataaaatttgataatcctcttttttaatttatactacatgtttaagttatattacttgaaacaattattttgaaagccactctaatacagcaggatttgcgcatgctgaagtttcagcatcaatctttgttacaaagataatatctcctccattagcaacagcgcttacttcatcaaatatttcttttgcagataatgtatctgtttttacaaagaatccttcaggcataaattgagcccatgaacctaaagattttatttttcctggtatattagtgccactgtgtacatgttcatgagaatgatcttctccgcatccacagccatcaccatgttcatgagaatgatcttctccacatccacaatcatcaccgtgttcgtgatgatggccatgagtatcgcttaaaaaatatgtaatcatatatgctgacattattatatcaatcccttctagctttttttatttatattaggttaacaagttatatttaaattatacagtaatattgatagttgtaaattatttctttgaaaatgttaaatgtggttagtatttcattaagtggaatactgaacttttatttaaatataattattagtgggatacttgcagaaaacagatattaattctatttttatggcaattagagaagtgaaaatttgatatgaattttattaatacagaaacaaaacttaacataacgcatataacataataaagcagaatattatatcatatttaaaattattttaagttagagaaatcttttagttaaaggagggacaagtatatggattttgcacagtatataacacaaaatgctctgattttgattcctgctctatatattgttggtatggtaataaaaaatacagaaaaaattaacgataaatatattcccctgatattattatttctaggaatattaggagctgttggaatcatgggccctagcgtagaatcagtaattcaaggcatactggtaacgggggctacagtctatactaatcaactaataaaacaaagttgtaagaaagaatgaggattttaatttaccagtaaagatttaatgactacaattttgtggttactatattatattaaatttattttgaggtttattgctgacaagcagatactgtcaacaataaacctcatttttagttgaataaaatacaatagtcctatataatttaaaatacaataagaaatgatttttaggttcatataaggttaagtgtatatgattaaaagggaaagtggttaaaatccactacagcccccgctactgtgatggaagactaatctctaaagtatataataaaagtgctcattaattaaaaatcagctgcttttaaatattatactaaaaaatccactgagaaattttcttgggaaggaagagaattaggatgaggccaaagtcaggagacctgcctaggagtttataaaaatgctattcttcggagggaagaaaacttgcaaatagcgggatgtagtagagtagattctacattcttaatttgttatgtatttcctccttatctaacgataaagaggatttttatatattccaaattataaatcttatgaaatatttataaatttattaaattaaggtcttttttaagacaattttaggaggaaaatacatgagaaaagctattttagtagttagtttcggaacaagccatttagaggcgcttaagagttcaattgaaaaaattgaaaataaaatcaaagaggaattcaaagattatgaagtttttagagcttttacagctcattttataataaagaaattaaaggcaaaggaaaatttggatatattaacaccagaagaagccctagaagatttgaaatctagaggatttgaagaagttatagtgcagccgcttcatataattccaggagaagaatttgattacatcaaaggcgttgtggaacaaaggaaaaatgattttaaagatcttaagcttggacgaccaatatttttttatcaaggaatgaatggattaccagaagattattctttatttattgaaagtattaaagatgttttcgaaggtgaagaaagtgtaatattatttggccacggtacagaacatccatctaatgcagtctatggaatgcttcaaactgttttggtagatgaagattatgagaatgtttttgtggcaactgtagaagggtatccaacagttgaaaatgtagtaaagaagctaaagaaaaaaggaataaataagacaaaacttgttcctttattacttgtggctggtgatcacgtaaagaatgatatggcatcagatgaagatcattctttaaagactaggcttcaaaaagaaggaattgaagtgaagttacatatgcacggtcttggagaacttgataaatttgatggactttatataaatagaatttatgactcaattgagaataaatacataaatgctggaaggactaaaaaacttagataatctaatttttgcagttgcaaaattctttgcaggtagttaggtagagtttaaaagtctttttagtacagaaaggaaaataatatgaggtctataattatatcttccaattgcagcggaggaggaaaaactacttttactcttggtcttatgaaagtacttaaaagtagaaattttcatgtacaaggttataaggtaggaccggattatatagatacagcatttcataaagcagtcacagggatagcttcaagaaatcttgatactttcttaatgggtgaagaaggtgtgaaaaaaagttttcaaaaaggttctggaaatattggtataatagaaggtgttatgggattatatgacggaattggagcaagtgaaaaaggttctacttatcatgtctcaaaacttttaggaaatatgccaatagttctagtgttatctcctaaggggcaaagtgcaagtatatgcgctgaaattagcggttttaaaaattataaggatgctaatattgttggggtcgtattaaattctgtaagtgaaaaatattataatttattaaagtatgcaatagaaaagaattgtaatataaaagtttttggatatattcctaaaacaccagaaatagcattaagcagcaggcatttagggcttgttcagagtatggaaattcttaatcttgaagaaaaattagatatatgtgcaaatttaatggaaaaatatgtggatatagatggaattataaatgcaactcaagagtataaaataagtatagatggtgatcttaataattcctttaaagcagatgataaacaaaaaaaatttgaaagtttaaaagaagaatctagaaatagaaatttaaaaataggagtggctttagataaggcattcagtttctattataaagataatttggaagctttagaaaatttgggtgagatagtttattttagtccaatcaatgataaagaattaccgaaaaacttagatttcttatatataggtggaggatatccagaagtattcaaaaaggaattggaaaacaattattctatgagaaaaagtattaaagatgctttagatggcggcttgagatgttatgcagaatgcggtggacttatgtatcttacagagtcaatagatggatcagaaatggttggtttttttaatggagatagcacaatgactaataagcttcagaattttggttactgtaaggttaaaatagacaacaaatattttaataataggagcataaaagataatgaatttgaaattaatgcccatgagtttcataagtcaaaggtagatttagatgaggataatgtatatgaagtagaaaaaactttatataatggggaagtattaaagtggaaatgcggatactttaaaaataatacattaggaggatatgcccatataaactttcttggaaatgaagaattattaaaagcattgcttaactttttatagaaaatgtaatatcaataagaagatatggtagatttgttggggggagcgtaatgagaaaacgtagtatacttctcagtataagcattataattattattgttttagcttttggcggttgtatttatatgaatataaatggcctgccttggaagatcaaagaaacagaagtgtttacacagacgtatttaagcaaaaagtacccagatttaaagtataaaattaatagagcttactataattcaaaatctgggaagtatttatgtaatgttagtactgaagaagacaccccagtaacatttagagtgacaatgcttaataaagacagtggtgaagataattattttgaaagcaaggttaatcttgaggctaaaaatatggtcacaagcttaattgaagaaaatgaacctagaataaagataaaacaaatttcagtattagaagatgctggagctaatgcagatagtaagagttatgataagtatacaagttttataccaggagattcatatcctctaaaaatagatataagatgggaaagtgatgaagtttctttagaagcttttgtagataaagtattgagaattagagaaaatttaaaaaatagagatatagcagtatgcggtcttgatgttattgatgataccaataactatagtattgatttatcaggaagagaagtaaatgggaaaaaagaaggcaactataattttacaaaggatcagattatagacgataaaatagcttatgaaatggaaaagtaaattattaatggatttattaaacttggaaagaggtgagcttggtgaggtgtttattagacccctcgctaaaaatatatggaatatttaaaaaatcctatgggaattgaagaaaaaagttttgagattattggtaacgagatgggggcgcattcatttagtgaagaagaactgcttatagttaaaagaactattcacactactgcagactttgaatataaagatttggtagaaataagtgaaacagcaattgaaactgcaaaagatatttttaaacaaggtgcaaagatctacacggatactaatatggccttaaacggaattaataaaatggccttagctaaaactaatagtgaagttatctgctatgtgaatgaagaaatagttcataaagaagcaaaggaaaaaaatattactagaagtatggcagcggttgaaaaagcttgcatggataatgtagatatattcgtttttggtaatgcaccaacagcactttttagacttaaagagttaataaaagaaggaaaggcaaaaccaaagcttataatagcggcgccagtagggtttgttggagctgtagaaagtaaggaaaatatggacgaacttaatataccttacataagaattaaaggaagaaaaggtggaagcactgttgcagcagcaatagttaatgctcttatgtacatggtggtttcaagataattaaatttattagattaaagatagttaaaaagttaatgatggcaggaggtgatttttatgtttgaaatgtacgttgatgtagatggaaaaaggttaagatgtggatatacaacaggttcttgtagtgctggggcagcaaaagcagcaacaattatcttatttaataaagagaaaaatcttaatgaaatagagattgcaactcctaaaggaattgatgtaacaatgcctatagaattaatagaaaaatttgatgattatgttgagtgtactattttaaaagatggcggagatgatcctgataacactcatgggatagaaataaaggccatggtaaaaaggatcaaaccaatagataataagatatttcaaaatgaagacttgcaaaagtttgatggtgttttagttgaagatagcagagcagaaaaagaagatgagttagaaagagtagtgcttaaaggcggaacaggagttggaattgtcactaaggatgggctttttattcctaaaggacaagcggctattaaccctgttcctagaaagatgataaaagaagaagtattaaaagtgttacctcctagagaaagagttgaagtaataatttcagtgcctcaaggagaaaaagtagcaaaaaagacttttaatcctaggcttgggattgaaggtgggatttctattcttgggacaacaggaattgtatatcctatgtcagaagatgcgcttaaagcttccataaagatagaaattacccaaaaagcaataaataatgaaagattagttttaacttttggaaatttaggcgataattattgtaaggaacttgggtttaaagaggaagaagtggtaacatgttcaaattttataggatttgcattagagacttgtgtttcatgtaaagttaagtctattataatagttggacatataggaaaaatgagtaaaatagcttatggatgctttaatacccacagtaaggtcaatggagtgaggcttgaagttattgcattagaacttgcacttcttggatatgatatgtcacttgtaaaaagagtgcttgaggaaaagacatgtgaaggcgcagttaaaatgcttggagatggatatgacaaactctatgagaacattggaaataaaatagttcaaaaaatcaaagagcatgtttatggagagctagaagttgacgctgtaatgtattatggcgcatcaaacccaattttattatggaagtccattaaggataattaataataaagttcaatataaattttagaataattcattagattatggattgtgtaaaatattttagggattaatattaaaaagttaattaagctttcatagggggacacaaaaatgatttatattgtagggcttggtcctggacacagggattatattatgcctaaggccttggaaatattaaaaaaatctaatatgataataggctttaaaagagcattggattccttagagtttgtagataataaaaaattatatataaataagctaagtgatattaacgaatatatatgtgatgagaaaaatagaagtatgattatttcgattgttgcatctggtgatccaactttttatgggataacaaattatataaaaagtaaagcaactttagaatttcaagtaataccagggataagttcttttcaatatctgacatgtaaattaaatatgtcatggaataatgcatacctaggaagcttacatggaaggaaagaagaatttttgactgtagttaataatcacgacttaagcatttggcttacagataaagagaataatcctgctatgttatgtgaaattttgcataaagaaaaagttagatgtaaagttgcaataggagaaaatttatcctatgaagatgagagtataactaatgggactccagaggaatttatgaataaaaaatatgattcactgagtgtatttatagtagatagaacaagtcgatagaacttataatgatttttgtgtgacgttgacgtttgattaatacctgaaatagaggaggaaattttcatggtttttataaaagatgaagagtttattagaggaaactgcccaatgacaaaggaagatataagaatactttcaattgctaaaatgaacttaacagataattctttagtattagatgttggaagtggtacagggagtattacagttcaggctgctaaaattgcaaaaaacggtaaggtgcttgcaatagaaaaaaattatgaagcatatgaaattacagaaactaatgttgaaaagtttgaatgtgataatgtaaagattttaaataaagaagcaagtagagtactggatactttgatttttcaaggcttaaaatttgattccatattcattggaggaagcagcgggcatttagaggagatattacttaaggtaaatgcaatcgtagtaaaaaaaggcacgatagttatgaattttattaccttagacaatgcatacagagcaattgaggtcatgaagaaactagattataaaattgaaatttcattagttaatataagtaaaaaccgtgaagatactttaatgatgatagctaataatccaatatatataattcaatgtataaggaattaagtataatttaataaagatttttaagataaaataatacataattgttataaataaaagtgtataaataaagataatatgatatcggtaactagaattaaaataataatatatacatatgtagttacttaggaagagaggaattataaaatggcaacattatacggaataggtgtaggacctggagatactgaacttttaactgtaaaggcagtaagaacaatagaaaggtgtcaagttgtagttgcaccatcggctactgaaggtggggaaagcattgcgcttgaaacagctagagaatatataaaaccaggtaccgaagttattgtaaagcattttccaatggggaagaaagatagagtaataaaagcattggaggcttatgaatttatagaagcgaggcttaaagaaggaaaggatgttgcatttttaactattggagatccgtatatttacagtacatatagtcatatgttaaagcatgttagagattgtggatttgatgttcaaacaattcctggaataacatctttttgtgcggctgggagcttagttaataggactttagttgtaggtgatgagaagctagtggttatgccggctactaaagtgaaagaaataacagatgaaaagtttgttgtaataatgaaagtatacaagcatgaagaagaagttataaatacattagaagaaaaaggctttgattatgtttatgcaagtcgagttggtagagagggcgagactgttttaactgaaagagaagaaatactaaaacttagagattatatgtctttaataatagcaaacagggaataaatataataaaatattagttaatttaacaataaaaaggagtgttttaagcatgatttattttataggggcaggtcctggagcagctgatttaataacagttagaggtcgtgatttattagaaagagcagatgtagtaatatatgctggttctttagtttcaaaagagcatttagaatattgcagacctgacgttcaaatttataattctgctaatatgactttagaggatgtaatggaaataatgaccatggaagaacaaatgggaaaattagttgtaaggctacatacaggtgatccatcaatttatggagctataagagagcaaatggttgaacttgacagggttagtatcccttatgaagttgttccaggtgtaagttcatttacaggtgcagcagctgctataaatagagaatttactttaccaggagtatcgcaaactgtcattttaactaggattgagggaagaactcctgttccagcaaatgaggatcttgaaacattggcatctattggagcatcaatggctatatttttatctatttcaatgatagataaagttgttgagaaacttagaaaaggatataaaaagaatgtttcaatagctgtagttgaaagagctacatggcctgatcaaagagtaattatgggaactcttgatgatatagcagaaaaagttaaggaaaataatattactaaatgtgcacaaatattagttggagattttattgatagcgattttgaaaaaagcttgttatatgataagagcttttcgcatatgttcagagacgctgaggatacaagtaatgaatctaaataatgaagaactatctaaagagtcccaaaatgaggcgataaattcacttagtaaaaatataagtataatttgtccatcgcataagggaaaagagatagcattgaagcttaaagaaagctttaatggaagattatatataaaagaaaataatccatcacaagatgagattaataattggaagtcagaaatgaacacttttgcatatggtgaagatttcagtttaaagactattacaaaagaagctatgaataattcagaaggtattatatttatatcttcaacaggaattgcagtaagagcaatagctccatttcttgaaggcaaggataaggatccgggaattgtggtagttgatctatcatgtaaatatgcaataaatatattaagtggacatttaggtggaggcaatgagcttacttataaggtatcagaaatattaaattctatgcctattataaccactgcaagtgataatttaggcttgattgccccggacattctagctaaagaaaagaatttgattattgaagatttaaaaaaagctaaatatatggcggcgcttttaattgataaaaaaataattggaattaaagatgattataatataattaaaatcagtaatggatacgaaaagatacagtgcttaagagatgattgtatttggataactcattgtttaaaaagtagtaacaatgaagatattgaaaaaaatgattattctaggatacttagacttataaaaaaagatatagttttaggtatcggttgtaggaaaggcacaacttatgaaaaattatatgactttgtaaatgcaaatttaataaaatataatttggatataagagcagtatcaggaattgtttctgtagatattaaagctaatgaagaaggtattataaaattagcggaaaaaattaattgtccattcaaaacttttagcaaagatgaaataaaaaccgttcaagataaatatgataaaagtgaatttgtatttaaaacacttggaataactggggtctgtgagccttctgttgatcttgcaggtgcagaggttattataagcaaaataaagcatgaaggtatgacattagctataggggtacttaaaaacatattggaataagttctaaaatcaatccttgatgttcatgcagtgggaaagtatgctataatatatctgatgaagcatttattttaaaaagtaggggagaagagaatatgacgattttggacatgctaaataaaatgaatgagaataataaattaatggctaaatcattagaaatcattaaagacaattatacaagtttagtaaatgacaattatgaattgactcttgatgaaaatagggaattaagtgtaaagattcctagtcttgaaagaagaaatgaatatgtatataaaagtgtggctgagtacccttatccattaactatgtgcatgagaatctcagaaagtagtaatgttgaaagatataactatatgttgtctaaattcatggatttatatagagataagttggatttgttatttaaggatgtacatatcgttgatacattaaaggcgaaaatagtaaaaactaaagatagaatagattacgtaacatattattcaatagctacaggagctattggtgcagtattattaattatattcaattttactaataatgtaaaaaatgcaattacaataggaattatagttttttttattcttgcattattcatgcagattacaaaagaaagccaagtgaaaaagatagttgatgcatatataagtttaataaaaacagaatggtatcaaaaagaattaaataagcaatatacatacctttgcaattttatagaataatataaattcattttcattaaataaatatcctatacaaaaaaacttactaaaaatttatttagtaagtttttttgtatttaggaaactataatgcaattaaatcagcggataacttttatagtagtctattttaccagagttaaatactataaaagaataaaaaatgtaattcactatgattaaatattttttcttaatgatgatgattcaacaaatacaaatttatctggtctatggcgagattctgtatattcaaaaagtttaccggaatcagtataagcatatgtttttactacagcaacacaatcatatgtacctaaatctaaaaatcttttatccaattctgttgcatgttcaacaacaataatcttttttgaagcaagaatttttgtgtttaaatctttttcaatatattcatatacggaattttgagcaatttctatagtcaaatcttttgctacatcagcactaaaataatttacatcaaggataattggttcattatcataaaatcttattctatgaaggtgatatacttcagtatctaattttaaagcagttattcttgataaggattcatctatagttatttttgaaaaatgcacaacactagttgtgaacttcttttttgtatgtaattcctgtaatccaagtagattaccaataggaagttctattgattctctgctttctaatattattacgcccttacctttaacgcttttaacatatccatctttactcaattcattaattgctcttctaacagtatttctactgcatttaaatttatcaactagttccatttcggtaggaagcatcatagaattatcatacttaccactatctatattgctttttaatatgtgatatatatctttgaattttacattaggcaaagttaacactcccttaagttatcttggggtatatatgctacaattggatttctacattttatacttaattgagcgtttatctaactaaaatcttaaatgtaaatttattattgtagcatatataaaatatttgtacttttatagttttcaatgaatatattatactttattttttttaataagttaactaaataattaaaataataaggtgataaattacttggtgtaatttattaatgtatgataatgtaagtcactccaacacctaaaaaatttgcactatatagataaacaaccatacgcgtaaagcttaaccagtaatcaccaaattgtagggggaagagagtagctcattaattttccctctgtagtttggcgttttcttttttctcgcttacagctccttcccaaacttactagtatctcatatattatttccaagttttcctttttaggaatgaaattaaggcatatttctttaagtttacttcctatagttgaatatatcataagcatacttatttctctattttcttctgttttatacttaaaatacaattcagaataaactgtatttattagcaaagttattatcaatctaccataaagcaaacaatttaagtaatcaattcctgctgatttgacatggtcaatctttccgtagcttttccagcatttaaataagagttctatttgccatcttaacctataaatatcaaggagcatgtccacatcagcttgttctttttcaatgtttgttatcataataacccagctcattagttccttgtcaattttctttggggctcttccttgagcttttgctttttctctagcccttcggattcgcaaattcacaatttcttctggtaatctttttcctattactctaaattcttctctattattttgtttcattccaacatataaataagtatctataacaccgctcgatttctttaagaaatcaatcatttcaactttttcaaaattcccttttttataattttctttataaagtgcagtattatatttaattttactaagaaaaaaagcagatttcttttcaagcattttaaaacactttttatcgaaatatcctaaatcaactaatagaagttcattagtgttaattttgtccgccaaagttttcatatatgaattatcatttgttgtgccatcctcaaattcaaatgtttcaatctgtttacttttgaaactatatactgtttgtattttcatttcagatgccgacttatcttctgaaaaacctttataagaatctcttaacgagtcatttagcttgattaagctactatcgcagatttttatatcattaaaggctttaaatatttcaatgtgattgtgtttaatgctcttaattattttatcctcaataatatttgtaagaatagtttttaaaaagtttgaacctgccttgagcttattttctatagcttgcctagacactttcaaattagggtttatatcttcacaaaaatttgctatatttcttaatgacggattttcaagactataaactccaaaagtaaatgctttaaaaaatgtaaatccatccaatttactatttctttgtgtaaatccagtagtcacggcggtttttgttattaatctttttgaaaaaagattaataattttcttaattttatccatactacttaatgaatttaaattaattttcattaaaagtcattcctttcttttttgtgtttattgttaggaatgactttttttattatttttataactgttaatatatgatttaactgttaaaatactcattagctttacgcgtatggataaacaacttaagaattcgatttatactttgcaataaatatcatactagaaagtagaaacatttttatgcaacaggcattgaaaatgagctgttaaaaggtcttaattgtaggttgttccattgatgcttgtcacaatgaaattgggagcaagcattagtggtgcaacctgcaatttagcactttcagcaaaattttcatagtcctgtgaaataacaatgcttttactttcggtggattattgcataagtctaggttatatattgtttatctatatagataagcaattttaaaactgaatttatatggtaacttaccgaaattataaatattttggttatgaaaagttatgaaaatatatttaggatttctagtgaagatatgaatttcaaactttggagctttgctaatttaaacttgatttaagagttattaaaatgacagaaaatcttaaatttgaataggttatttgaacaaattttaaaatatgtttaaacatattttaaaatttgtttaatgctataagatggcttaaatgctgaatactaaacattttcaagaaatttgtttaaacaaatgttaaaaatattattgactatatgtttaaaatggattatgatgatattgtaaacatttaaatgttaggtttaatataaaatttattaattaattgttcaattggactaatacaaaacaaaattgtattaatattcatgaacttattctttaaagtaataaaaatcaaattggaggttttaataatggggaaatttcaaaatgatgcaaaagaactattaaagctagttggtggaaaagaaaacatctcagcagttacacattgtgttactagaatgagatttgtattaaacgatccaagtaaagctggcgtaagtgaaattgaaaaattaaaaagcgttaaagggacatttacacaagcaggacagttccaagttataattgggaatgaagtatcaacattttataatgactttatagcagtttcaggaatagatggagtaagtaaagacgcagtaaaagatgttgctaaaaacaatatgacttttatacaaaagcttatggcaaatatagcagaaatattttcaccacttattccagcaatcatcgttggaggtttgattttaggatttagaaatgttatcggagatatgaaattattagaaggcggaacaaaatctttagttgaagtatctcaattctgggctgggacaaacagtttcttgtggttaattggagaagctatattccacttcttaccagtaggtattacatggtcaattacaaagaaaatggggacaacccaaattcttggtatagttttaggtattacattagtttcaccacaacttttaaatgcatatgcagttgcaggtacaccagctgataaaattccattctgggattttggatttgcacatgtaaacatgattggatatcaagcacaagttataccagctatacttgcaggttttgcattagtatttcttgaaagaggcgcaagaaagataagtccagcatcaatatcaatgatagttgtaccattctttgctttagtaccagctgttttgatagctcatattgttataggacctataggatgggcaattggtgcagctatttcaaaagtagtatatggtggacttacatcttcatttggtatgatttttgcagcaatctttggattcctttatgcaccacttgttattacaggacttcaccacatgacaaatgcaatagatcttcaattaatggcacaatttggcggaacatcactttggccaatgatagcattatctaatatcgcacaaggttcagcagttttagctatgatatatttacaaagaaagaatcaagaagctcaagaggttaatgtaccagcctgcatttcagcttaccttggagttactgaaccagcaatgtttggtgttaacttaaagcatggattcccattcttctgtggaatggcaggatcagcaatagcagcaataatttcagttggaagtggcgtaatggcaaactcaattggtgttggaggacttccaggtatattatcaataaaaccagcattcatgatgatatttgcattagcaatgcttgtagcagtagtagtaccatttgttcttacagtaattgtagggaaaaagaaagcaataagctaggataggaaggaagaaattatgaaggattttaagaaaagtactatttatcaaatatatcctaaatcattttatgatacaaacggtgatggaattggagatttaaacggagtaatagaaaaattagattatttaaaaaatttaggtatagattatatatggcttactcctttttatccttctcctcaagtagataacggatatgatatctctgattactataatattgacccaagctttggtacattagaagatttcgaaaaattagtacaagaagcagaaaaaagagatatatatgtaatgcttgatatggtacttaatcatacatcaacagaacatgaatggttcaaaaaagctataagcggagatagaaaatataaagatttctatatatttaaagaatcagaaaaagataaaccacctacaaattgggaatctaaatttggtggaaatgcatgggaatatgtagaaaagtttgatgagtattacctacatctttatgatagaagtcaggcagatttgaattgggataatgaagaagttagaaatgagatttatggtgttgttaacttttggcttaaaaaaggtgtcaaaggattaagatttgatgttataaatttaatttcaaaaccagaaaagtttgaaagtgattcagaaggtgatggaagaagattctatacagatggtcctaaaattcatgactatctccacgagcttaatgaaaatacctatggaaaatatgaaaatattgtaactgtaggagaaatgtcatcaacttctcttgagaattgtataagatattctaatccagaagaaaaagaattatcaatggtatttaatttccatcatttaaaagttgattactataaaggcgataaatggactgttatggattttgactttatgaagttgaaggcgttatttaaaacttggcaagaagaaattcaaaatgggtggaatgctctgttttggtgtaatcatgatcagcctagaatagtttctcggtttggaaatgataaagaatatttaaaagaaagtgccaaaatgctggcaactacaatacacatgatgagggggactccatatgtgtatcaaggtgaagagattggaatgacaaacccctatttcgatagcatagagaagtatagagatgtagaatctataaattattataatattttaaaagagcagggaaaatctgaagaagagatattacagattttaaaagcaaaatctcgtgataattctagaactccagtacaatggaatgatagtgaaaatgcgggatttactaaaggtgaaccatggatacctgttagcagtgaatataaaagaataaatgttgaacaagcattgaaggatgaagattcgattttctatcattatcaaaagctaataaagttgagaaaagattatgaagtgatttcaaatggaagtataaagtttattcttgaagaaaataataaagtgctttcatatgtaagaaacttaggcgacgctacagtacttgtcataaataatttttatggagaaagtgcaaaagtagagattccagatgaatatgcaaatgaaagtgctaagagtaaaatattaatatcaaattataaagatagtagtgtattgaataaagagttaaatttaagaccatttgaatcaattgtatatcatatatagataaacaaattatgatctatacttatgcgtataaattaccgaaatcataaatattttgattccgaaaagctatgaaaatatcgctgaaggttctaagcagcaggttgtatccactttagcatgctccaactttcagtttgacaagctaaaatggaacaacctacagctaagaacctttagcagctcattttcaaatgttttctacacaaatatatttatgatttctagttaggatatgaacataaagttttagcaactttttaaatatgttcatctgataagtctaattcttaaattgtttatctagagaaaattaggaactttaaaattatacgatatatagaaattacagtagcaactgctcagcaaatgggtagttgttgcttttttgtacagaaatttataagagcttccagcattataatacgtgagtttataattttttagttatgcagtttatataggtagagaaaatatgaagttaaagttagttataataatatttaactaagaggctggtggttttagaagataagtctaataagaaattgagtaaaatcaggccacatacctataacaattctatgtgctattattgctataagcccatagaataaaggaaaagtctaggaattaatataaaagctatattaatatatcttatgaattagtataataattaaataagatatattattaagaaggaaggtgaattagctctgggtatactattaaagtatgctgcagactaaaatgtaattatgaatgaaaagattagcactataataaatgaaatgataaaatactatgctaaagatccaagaagggttaatcactttttaaaggtattttcttttgctaaatctataggggaaattgaaaatatagataagaatactcaggaaattttagaagtagctgcagtaatgcatgatataggaataaaagttagtgaagaaaaatataattcttctgctggaaattatcaggagcttgaagggcctccagttgcaaaggaaatgctttcaaaatttaattttagtgaagaatttattgaaagagtatgctatttgattgggcatcatcatacatatagcaaaattgatggtattgactatcaaatactaatagaagccgattttttagttaatatttatgaagatgaaataaaaactcctcaaattgaaattattaaagaaaagtatttcaagacaaaggcaggaaatgatttcttagttaatctgtatttgtaataattgtgaagagaaaattatttaagaaatgtttaaaaatatgttgcaataaatgagtgacatattcatattatgtagtaaatttattaataaaacaattaagggaatgataattgtgaatctttgctatataataaaaagttttagtcaaatagatttactaagaaaatttgtaaagagtaatattaatataattgggattaattcaatttcggagttaaaggatgattatttattagtaatatccaataaagatagtgactttaatgaagtgatgaacaaattaacaaatgctcttgtttgggaagaattatataattatttttatgattattccttagatagatatatgaagaattatgatttttatcacttaaagtattcattaaaaagagcgctaaaacctgataatgaagcgattgcagtaggttcatcatatgccttatttggaattgaagagagtgtattaaattttccgtgtgttaacttgtcattagcatcacaagacatttattacgcatctgtaattggaaaatatgcaattagtcaaaacaataatattaaaaagatatttattggaactggctattattcattttataatgatttatcacttagccaaggtggcgaattgatgcgtttaacagacgtatactacccaatttttaaggataagcataattgtaaggagttaccttgtaataattcatggatttcatttaaatatgaaatttttgacgtggaacaaatattggatttcttttcaaataatttttttgaagaatctggtggaaagtattttgctgggacaagagatagatttaaatcgagaatagtctttggagaaaaaaaggatgctaaatggtttgaacttgatgatagtttaaaggaaaaatcagcatatgagagagctgattcacacaataaggctattaagtatatagattcgtataaagaaaatatcaatattatgaattcatttgtatctttttgcaatgagagaaatgttaaagtctacttgcttgtatttccgggaactaaattttataaaaaatatcttttgaaagagtataaggaatcttatgcatcagctttaagtttaattagtggagaaataagatttattgatcttgacgagttttgcgtatttgatgataaagattttgtagacatggaccatttagatgaaggtggtgcagtcaaagtttcatggattataaataatcttaattgacagataaaatattaattagataattttagagtcatattctgaagaatagatatttaaatattcttcagaatatttattgtaaggaatattagaatatagaacacttaatcatatattctaattattctctagaatcgtaactagcacatttagtttcggtatataattgggctccattacctgctacttgtatagaatctaagctacaaagtttgttatagttatgattacatgtttcaacgttgcaagttagagcatcgcatcttccttgagcattagtattattagttaaatcgctataatgagattcttgtaaaaatgaaccgcagcaagttcctctttcactacttgcagacattccaccaatatcaactctatttgaatagcaaacgccactattgttatgtgaacaattagttacttcacaattaattttttccacaaaaaacacactcctttaagttaaatcttaatctagttataatattatttgctaaagtatctatcaagtaagcctttaaatgctttaccatgtcttgcttcatctttgcacatttcatgaacagtatcatgtatagcatctaaattatgctccttagctaaggttgcaagtttctttttaccttcgcaagcaccatattcagcttcaactctagcacttaaattagatttagtatcaggaacaacaacttcccctaaaagttctgcgaatttagcagcatgttctgcttcttcataagcaattcttttatatgcttcacctacttcaggataaccttcacggtcagcttgacgtgacattgctaagtacattccgacttcagtacattcacctatgaaattagctcttaagccttctaataattcatcattaagaccgccagcaacaccgattctatgttcatcagcaaaatttaatgagtcagtcatttccttgaatttgtcagcacctgctttacagataggacaaaagtctggtggtgtgtcaccttcatggatataaccacaaatagtacaaacaaatcttttcatttaaaattcctccataaactattattgtattttttaggtattaaacaaccttaaaaatagtattaccaattaaaacaaaaatattaatatataatttttattaattaaattattcaggtgtcgtataattttctaaatatgttataatttattggagtgatttaagagtgataaacaaggaggaatttttacttgaataacaattttgaatatatattatttgatttagatggaacacttactgattctggcgaaggaataactaaatcagttcaatatgcgttaaagtcttttggaattttagttgatgatcttaaagaattaaacaaatttattggaccacctttaaaggattcatttaaagaatattataacttcgatgaagaaaaagcacagcttgggttggtaaaatacagagaatattttgctgataaaggtatctatgaaaataagttatatgatggaataccagaacttctagaggtacttaagaaaaataataaaaaaattgtacttgctacatcaaaacctgaagtgtatgcaagacaaattttacaatactttaaaattgataagtattttgattttgcagctggagcagattttgaagaaacaagagtaaataaaggtgatgtaataaaatatgctttacaagaggctaatattacagacttatcaaaggttatcatggtaggagatagagaacatgatattatcggcgcaaaagaaaataatataaaatcagtgggagttctttatggttttggagatgttattgaactaacccaagccagagcagaatatatagttaaggatacagaagaactattgaatattcttctttaaaaaattataaatcagttatataaggataattatgttgataccttcaatactcagtaaagaaatataaaaattaattttattgtaacatcagttacggaagtaatatggaataaacattataataagattaaagataaacaataaaaacttaaaagataattcattaagatatatgagaggagaatgtcaacatgataactaaggatttaacaataggagaagtgattcgtataaaggaaaatgcaccacaaattttaatgagctttggaatgggatgtgttggatgcccatctgcacaagctgaaacaattgaagatgcagttaaagttcatggaataaatttagaagaattattagaacaattaaataaataacatatttaatagaaaggctgcttaaaactaagcggtcttttttttgtacagaaaaatataatcaagtcaaatcagtgaataaatcttgtaagtggcagaaacacatactctgtaaagtagattttccaatattttattaaatcaatagtttaaatgttataagaataatatttaagggttagattataatattatctataataaaaaatcgcagtaaactatggttaagtgccgtatttagcttagcactcttcttatataagttccgtattgtgtttcgcaatcttttcatataagttccatattgtgcttcgcactcttttaatatgtgtggatttttttgcgtatttatctttttaagaaaatacgcaaaaaatttagcaggcaaatagatttgtcttttattatcttggttcacttcagatcaagataaatagcctgttatataattcatgctttcaaggggcaccttgcccatagatttatctgagatattatttaaaatttaaataatcgagaggattttatatgaaaactattgaaaaagagtttgtggttattgcagagggaaaatcatctgaaacatgtttgcaagaatttaatagtatagatattaatttaactcagttaagaaaaaacgtagatattttaagaaaaagcttaaatccaggagtgaaatttatggctgttgtaaaaggggatgcatatggacatggattagttcctatagctcaggaactggaaaaatgtagatgtgatgcaattggagttgtgaggctgactgaggctgttgctttaaggaaaggaaaaattaaaattccagtggtaatattggcacctttaatgccatctcaatgccaatgggttgtagaacataatattagcgtaatggtagataatgagaagatagtttctgcgttaaataaagaagcggcgtctaaaaataaggtggttgacgtgcatataaaagttaatacaggcttgaatcgatatggaattgaaacagatgaagtcgtaaggtttattcatatgattaatgaaaaatatcttcatataaatataaaaggtatatatactcatttcaaagatcctgaatataatgagcagttcacgtatgatcaaatgatgaaatttaataaggttttgaagaaacttgaagaagtgaatttaagacctccaattgcacatgcagctggatctgcaggaatactcatgtatccagaatcacattatgatatggtaagatgtggattgatattatatgggcttgagcataagccagatgaaaaaatgctgcctgaaggagtaagtcctattatgtctgtaaaaagtaaaatcataaaattggataaggttaaagcaaatgcatctggaggatatggtgataactttatagctaaaagagatagtgttgttgcagttgttggaataggttacggagatggcatatctagaggttggaaagaagttttaattgcaggaaaaagggtcccagtagtaaattactttatggatggtatacttgttgatgttacagatataaaggaaaaagtaaaagaatttgatgaagtagtcataataggaaaacaaggagatgaatcaatcagttgggaagatgcttgccagagtatgaattcatatatggatgagcaattccaaagaattactgaaagagtaccaaaacattattttatttataaatgatacaatctagattataatatcaaataaaggattttagctgaaaggggggaaaacattgactttgcaacaattaaaatatgctcttgaaattgcaaggtacgggtcaataaacgaggcagctaaaaaattatttatatctcagccaagtctatctaattcaataagagaacttgaaagtgaactgggaattgtaatatttgagaggacaaatagaggaattagcatttcttcagatgggattgaattcttagggtatgctcgccaaataagtgaacaagctgaatttattgaggaccgctatcatggaagaaaagaaaagattatgcatttctctgtatcaactcaacattatgcttttgttgtaaatgcatttacgaaactcttaaaggaaattgaaacaaatcagtatgagtttaatttaagagaaacaaagacatatgaaataatagaagatgtaaaaactcttcgtagtgatgttgggattttatatattaacgaagtaaactctaaggttatgaatagaatttttagtgatagtaatttgaaattcactccactttttaatgcaaacccacatataatcatcagtaataatcatcctctttctactaaagaaagtgttactactaatgagatgttagaatttacttatataacatttgaacagggaattaataattcatttaatttttcagaagaaatgatgaatatggctaatgttcctaaaagcattaaagttattgatagagcaacactttcaactttattaaccagtacagatagttatacaattggaacaggatttatagactctgattttgatgaaagcaaacttaaagcaataccaatagaatgtgatgaaattttcacagttggatggatagcccataaggatattaagcttaataaaataacaacgcgctacattgagattttaaacgaaattatttcaacaagttatttcgacttaaattattatctgttatagcagtttaaatggaggaaaatatgagtaatgagattataggtacaaagagaaatagtccaccttttcgatatgatatagttggaagttttcttagaactgatgaaattaaaattgcacggaaacaatataatagtggagaaataaatgctcaagagctaagaaatattgaagatatagaaataaggaagcttatagaaaaggaaaaagaaataggattaatagctgttactgatggagagtttaggagatcttggtggcatcttgatttttttgttggaatagaaggtacaaagaaaataacattaaatcaaggaggtagtgttcaaggatctagaacaaaagctgaaagctttcaaattgttgacaagataagatttaataagcatccaatgttagagcattttaagtatttaaatagcattgttaaagatcaaaatattgctaaatttactattccatcaccatctctctttcattttgttcaaagtcacaataaaaataatgtatatggcagttatgaagagctgatggaagacattattagtgtttacaaatctgcaataaaggagttttacgatgcaggctgtcgttatttgcagcttgatgatactgcatggggaaccctatgtagtgaaagacacagaagttattttaggagtcagggaattgacccagaagctctttcaaagaattatgtaagattgataaatgagagcgtcaaagaaaaaccagaagatatgatcataactttgcatgtttgtcgtggaaatttacattcaataggatttgcatcaggtggatatgaacctattgcagaagaattattttctaatgctaaggtggatggattctttcttgaatatgatagtgaaagatgcggagattttaagccactaagatttataaatgatcagtttgttgtattgggacttgtgacaacaaagcatggaggtcttgaaagtaaagagcaattaaaaaatcgtattgcagaagcttctcaatatgtagatattaataaactttgtctaagcccacagtgtggttttgcatcaacagaagaaggaaatataattactgaagaagaacaatgggagaaaattaagcttgttattgaaacagctaatgaaatttggaagttatagattatcataagggtgactctgtatattactaatatatcttaggcatatacggagttatttttttattttctagtaactgtccataaaagcaaagccttcacaaagtataatgaaaatagttctatttttgtaggtgattatattattagataatctaaggatattgtgtacactttgatagtataaattatgagaaggggtgatttagaagggtgcattttgaaagtacatttgcttgttataggaaaaaattatagccagtaatagttttttgaagttaccttacttggggttaaacatgctatactgatttcaagaataaagcaaggcaattaagggggattaaaaaaatgagtatagaatttaaaaatgcaaaacaaagaagtgttgcaccatttagggctgatattgtaggaagttttttacgaccagaggtaattaaggaggcgcgtgctaaatttcaaaatcaagaaattttaagtagtgaattaagaagaatagaagatgaagaaataataaaattagtgaaaaaacaaaaggaacttggacttaaagcagtaacagatggagaatttaggcgctcatggtggcatcttgattttatgtggggattagatggagtagaaaaacgtgtactagaagcaggctataaatttaatggcttagaaactagagcagaaacagccacattaacaggaaaaatagattttagtaatcatccgatgcttgaacattataaatttttaagaagtatctctggagatgatatagtggctagacagacgattccagcaccagcacaatttcttgcagaacttcaacgtggtgaaaataaggagattacagaatctatttataaaaacatagatgagttaattttagatattgcaaatgcttacaaaaaagctattaaagcattttataacgaaggttgcagaaatcttcaacttgacgattgtacttggggtatgctttgtgataaaaaatattgggaagctagacaacaagaaggcgtagatacaaatgacattgctaaactatacgcaaaggtaaacaacttagcaattgaagaccatcctgaagatttggttattacaatgcatgtttgccgtggaaattataattcaacatgggcaggatctggcggatatgaaccagtagcagaaattctttttggaactgtaaatgtagatggattttatctagagtatgatacagatcgtgcaggagattttgcaccattaaggtttattaaaaatcaacaagtagttttagggttaataagttccaagacaggaatattagaaaataaagaagaagttaaagaaagaattagagaagcaacaaaatacgtagatattaaccaagtttgcttaagtccacaatgtggttttgcctctactgaggagggaaatattctaacagaagaagaacaatggaataagataaagctagtaagagaaatttcagaagaaatttggaaataaaaatatatgatttcttccttaagtgagtataatataattatatttataggctaatttgaaagataaaaagcaaattagaaggaggatttaaatgagagtaatgacctttaatttaagacgcgatgttcctatagattttaatgatagatggaataatagaaggagcttgatttataacgtaataaatgagtataaatgcgatataataggggttcaggaaattaaagataatatgcttaatgatattaaagaaaatattgaaggatataatattattggagcaccaagaggaaaaaaagtttcttccgaaagaaatagtttattaatctctagaaattatttaattgaagattataaaactttctggctatctgaaactccagataagataggaagccgcgtatggtactcatatcttccaagaatttgcacaacagccattttacaaatggataatggaagaagagttagggtttgtaatactcatttagataatctgcttccaaaggcaagaatgtatggtttaaaaaagattttagaattcatagaagatgaaaaacttccagttatattaatgggggattttaatgatagacctaatagtaagttgattaaaagtcttaaagagggaaaaatatcaagtaaaaaattattaccagtacaagacgtaaacatggggttatataatgaatctacaataggaaatttcaaaaggtcaggaaaagggcttcatatagattatatatttgtatcggaggaaatagatgtagttaatgctgaaataattaaatataatgttaatgggaagtatccctctgatcattacccgttaatggcagatatattagtgaaatagattataccgtaatcaatgcaaataataatagaagagttgtatatttagtatataaatgaagaatatatggcttggaattatgttataacttacagagattataaatattttaatcctaaaagctacgaatatatttattatttctagcgatgatgattctaaagctttagcaaataggtatatttatctgataagtcagatctttaaattgaatatataaaaattcaaataaagcattagtaaaaaaacttggaattctaaaattatgaatccaagtttttttattgtctagaaaagtataaaaaatttaaattttgaaagctagttatatcaatggttaagaggaggttggtttgtaaaaatatgattaagaaaataaatcatattcgcctgtataaaatgttcttatatgcacaatacggaacttaaccacagtcgcctgcgaattttttacttctttagaattttatattatagtggaatctcaagctacacaggcggctgggattttggtgttatgtgatttttagtaaattaagaagttaaagttatactttgtgctgattatactggatataaatacatgatcacccaattaactttaaattgaagaaaaagtgttatataatagtatatattgtaaataaattaaaaataaaataaaaaaatatattatctatataaaggagaataaatttattgtcgaaattagagaaatgtgtatgcgtaacatacatatgtttagcaattgtattaggtgggcttgcagcttattataaagtaacatttggtgaaataaattacagcagcttaatagctagaaaagataaggatacctctgatgcaaatgataatgctactaataaaaatgagaatatagaaaaagtattaactgccgcacctaaagtgccgataaaagcagaattaacagcctactgcaattgcgctatatgctcagaagcctggggttcagagactgcaatgcaaacccatactagagttggaactatagctgtacctaaaaatattccgttaggaagtaaaatatatattccagatttaaaagattacaaagatgacggtatttttgatgcagaagatagaggtggtgcagttaaagttaaaagcgatggcacctatataatagatgtatggcttccaacccatgagcaagtcaaggaatttggaagaaaaaagactacggtttatttaataaaataatagtggcttgaagtttttctaatattcaattaaaattatgttagtatgaggaaataaagcaagaaaaaaatagaatatatatattgcaaaaatagtccttcatcataattctaaaaaatattacaagaattttagatgtaattgtgaattgtgaaatgtgcattgtgaattgtaatatatattacatatattttgttaagaagagtctttttttaggctaagggggacaataggcttatgggtcaatcaaaagaaaatgatcaaatattttgggacagtagagaaaacattatatcaccagaattagttgaagaaagaatagaagagatgaatgaaacgttacttgtttatagatcagcaataaaggaagttaagactaaattagatattttagatgatgaacttaagataaagaggaagaggaatccgattgaatacatgaaatccagagtgaagactccaagcagtattatggataaacttaaacgtaaagggttcgagatgagtattgaatctgctaaaaagaatttaaatgatattgcgggaattagagttatctgttcttttgtaggtgatatatatgatattgccaatatgctaataagacaggatgatataacactaattgaagaaaaagattatataaacagtcctaagccaaatggttatagaagtcttcatttagttatagaggttccaatatttttttcggatcatgtagagccagtcagagttgaagttcaaattagaacgatagctatggacttttgggctagtcttgagcataaattatattataagacatctggagatggaccgctgcatattacgcaagacttaaaggaatgtgcggagcttatagcctctacagatatgaggatgcaggatatacaaagaaaggtagaaaaactaagataggtggtttgttaaaatgataaaagagcttgtattgaaaaatagatcatatcggaggttttatcaggataagagcattgatatgaatactttaagagacttggtggatttagcgaggctatcaccatcaggagctaataaacaagtattaaggtacattttatcaaatgaaaaagaacaaaatgaaaaaataagtaaatgcatattttgggcaggttactataaggattgggatggtcctaaagaaggcgaaaaaccaagtgcttatatagtagtactaaaagatacaagtcttggccaaggtgcgccgcaagatgacggaatagcagtacaaagtatgttacttggagctgttgaaaataatttgggcggatgcattataggaaatatagatagaaagaatttaagagaagaactaaatttagatgaaaaatttgaaattgctttggtagtagctcttggttatcctaaagaagaagtggttatagaaaatataaatgaatctggagatgtgaagtattggagagatgacaaccaagtacatcatgttccaaaaagaacattggatgatttgattttataattagggaactcaaatctatgatttggtgtgagtaggttaagcagaccgctcaaaagtgatgctccaaatcttgtatttggctataagtgaaaagtcattaattgcagaatagctgcttaatttataggttcagaactttttctgtgagcgtctatgatttgatgatgatcgcttactttgcaagtatcagcgaacaaatgtgagccgagtttcttaaaaaatattgatataatagtgtaattttgaacatactatacttgttactttgtagaaaaaggagaatagtatatatggaaagaatacattataatgttgatggattagcaaatgaaaatatgaaaacacaagtcaaaaatgcactggaaaaaatccaaggtgtagataaggtttgtgtagatcttgcacgtggaagtgttgaagtagtatataatgctcctgcaacagaagaagaaattaaaagctgtatagagaatacaggacatgatgctagataaaagaaaatatctttttagatttattgctaaagaggaatgtatttaagtttacattcctctttagtttttatgtaaatataaaacttgaaccaggattagccttctattatttttacataaaacattctatctctaggaccatcaaactcacagaaatatacgttttgccatcttcctaaaattagattgccattatttaaaattagagtttgtgaagcacctactgttgaagattttagatgagaatgtgaatttccttcaaaatgcttataattaggatctgtggttggataagttttttcaaaaccatatattaaatcgctaactacatctggatctgcattttcatttatagttattccagctgtagtatgagggcaataaactactatgattccatttttaatattactgtttttaatatcttctcttatataagaagttatatcaaccatagattgtctaggtttaatttcgagggagtgtttaaataaatttgacataataaagcctccttaacattgtttttacataatattataatataccaattatgtaaatatataaacaattttataaatctatattgtaataatagacttatattttaatgaaccagatgatttattggaagtagaatgcagaaacttaattgaaccatatatgcagcagtgtaattgaatttttttattctctaggaattttaagtctattttataaattatgttaataaaaataatagtaaatatagatttttgatttggagaggataagaaaatgataaaaaccattagttttaaatatatattaatgttaggaactttaataagtattgtatttgcatttcaattaatttgtgatgtaaaggcaaatggggaatgggtatatgtaaataatagctggcgatattatagtggtcccgaacaaaatactggttggtataaatacaaagataattggtattatttagatgaaaacggtatggcaaaaaccggatggcataaaagtgaaggcaagtggtattatctagacacagttacaggaaaaatgctgactggatggattcaaaatagagggaattggtattatctaaatagttctggagaaatggtgacaggatggcttagatataatggaaatttatattatttaaatgcctctggagtaatggttaaggacatatatattggaacctattatttaggaccagatggggcatgggaagaaggatagatagttgaaataaattatcttacagatacacagtgaaattaccaatctgtaaaaacttgaaaaaataaaaaatactatttcaaaatatattagtaaaaaacattgagagatagtatcttttatataataattctatatctaaaaagaaaaagcttgtcctagaaaatgctaaattgtagctttattgacctatcaacttatcgttttcaaagatatgttcaattaaccaatcatttaaaagttgtaatagagtagaaattgattcattctgattttcatcaatactcctaaaatctacttcattaattctttttataaaagcgtcatgttctatcttttgtgtgaacattcttttatagttaattttcttcatatattcttcttctgctttaaaatggaatgaggtataatcacgtagctcatctactaactctaatatgtcatcatatttatcagttgtaaaatcattttttagtaaattgtaagctttgtctgctatttcgaagagaactttgtgctgttcgtcaataaaatcaattccagtcttaaattcttctttaaattcatacattaaatgttaccttctttcttataattgtataattacatataaaataattatatatcacttttgtaaaattttctagataagggataaagataattcctatcaataagagtaaataacattggtatatataagaaactatataaatcctgctaaattaatgatacagtagtagtagataattgtacaacaattatcaatataaactatatattgcacttaagtttttacattttaagattaattggtctcttttttattaatatcttaaacttgctagagataccacaatcataagctacgctggaattatgaaatattattcatttcggtgagatatatgcataagtatagattatagttggtttatctatattgcaatacataaaatatgaaaaataaattggaaagggaattggaatttatggaagtgattcagaacatagataataatattttagaatttatacaaatccatatgaggactcccgttttagataagatcatgccactaataactattcttggaagcaaaattactatatggacgtttattgctttaatacttataatgggaaaaaaatataggaagtatggtattatgatcatatgctctttgatattatgttttattgtaggaaatttagggctaaaacctttagtagctagaactcgtccttttaatgctgaaccaatattaaatatggttcatatgaagctgccaacagatttttcttttccttcaggccatactatgtgttcatttgcaccagcaactataattaattatatgaataagagagctgggatacttgcattaactctaagtacattaataggcttttcaaggttatacttgtatgtacattatccatcagatgtttttgcagcgatggttattgggcttttaataggtaatttagttattgcagcatttaataaaagagcattaagttctattttgagctaaaccaagttactattgattccgatgtgatttttgaagatgaaaggagatgttaagaatgaaaaacgaacaagaaagaattccaaagtggaatgaagttttgatggataattctgaggttatgaatgctaaattaagtagatttattcttatgggaactctattatatacaattttaatattgtatttcatgttcttgggatttagtaggctagaccatagaatcaataatgatcagtatacatttatgtttgtgccagaaggggttccgctaagatttccgaaactaactatgtcatggttatacgattttggaaacattgctgcttttatcccttttggaatagtaattccattgttgtatcgtatacgttttagaaagtttataacattgttcatattagtgatttcttttttggaagtgttgcagtccttaacttttatgggcacatttgatatcatggatattatatctaatacattaggtgcaatcatgggatttgtagggtatagagtaggattttcttctgagattacgtttaaaaaactagttgcttctgcagtatctattcttatgctaatcgtcggggttatggtggtttctgaaacaatcgattatggtgtacatgttaatgaaagaataggacctgtccaagcattaaatgatgcgaatacaaccatcccaataactaatagtttttcaacttttacggttgaagatgaggcagtacagcctaaatttaatctgtttggaagtagtgatggaatagataaggagtatttatttaatttaggcaagaaaaatctatggctctatgccaattatggtattcccgacggagaagaatataagggttccgttacgattatgattaatggggaagagtttgctcagtttactgatcaagacaaagatagccatataatgaaattagagacgttttttgattcggagataaaagacgttaaaattatagttactggaaatgctaaggtatgggatgttagcatcgcagaaataaagcattggtgggagtaactgcgataacgaagaaatatgaaattttagacaatcatcatcttggatattataaaggttatataaaaactagttattcaacaaaccatatttaataactttgaaaataattttttattgttagtaaattattattttgaaaattaaagatatacattataataattatgtggaagattattatgaaagcaaattagtgaaaatgatattggagcttattacaaagggggaagaatgtgagttgggattgtgcggtatggcactgcaatagtgtaaaaagtaaagaggatgcagaaattctatataaacgactatgcgaaggagatacttcgttaatcggtcctacacaaaaaatacaagatttttatgaagaattaacagctaggcatcctgaaattgatgatataagtgaagaggaaattggggatttagatttatgcccatggagtgtaacttttgataaatcagaaggacacattattatgtcttgtgtatttagcaaggctgattatgtaagcgatttaataaaggaattagctcaaaaacatgaactatctttctacgagcctcaaaataaaaattttatttataattaaaagtacatagataataatctttgctgtttgtggttaaatgtggtaatatagaaaggtggttttttattataatttaaattttttactttaaattataatgggatatgagaaaaataaattggggagggatattaaatattatatggtcaaggtaaaatattctgctatatatactgataattttggctgtgagcaggcagaactatactttctaaaagggggacttcaatttaatataagagattgcgtcttttatgatgatcattttgatttcgatttttatactaagagacctaatgagcataaacaacttttctatttaaaggatgatgaattaatagaatatgttatggatgtaagaattccattaataatgacatatgatggtgaggaatgtgtgagagaatctatattatgcattaagagacagagaaattcttataataatatgctttcacttgatctagatggaaaatcttatactgttgaaggatataatttgcaagaattattatataaaatgaagaaaaaactgcctaatgaatatactatggaatctgatttttcatgtatgctgggcgtatattctattgaaacaaataaagaaaatgatttttattgttttagaaatttcgaagaggaagatgatgaaagtgcttctagcgaatctttttgtttggaatcctctgattttagaagtagagatgcttttgatggacttaaaaagtatccaattacttatatattcaatgaatattgtttaagtaagatttaatcagtcatatttatgtataataatataaaaaagagatggcgcatataagatgtgctatctctttttggttaataccacgattcataagatcatgttcatataatagtataatccgaatttcaaaaaattataccaagagttaaaaattatattgcttgatttattttttcctttgattctagtgttagtgaagaattcaattgtgtcattaaatttggatctagaatttgttctaattcttcagaagttaatatacctttagctagaacaagttcctttacagaaattcctgattttaatgactcttttgcaatgtcagcagaattttggtatccaatgtatgggcaaagtgctgttacaataccaacactattgtctaagagttctttgcatcttacttcattagcagtaatacctataatacaattatcaactaaagttgcagtagcattttgaagcgtttctattgactcaaataatttgtagaatagaacaggttcaaaagcattaagctctaattgaccagcttctgccgccatagttattgttaaatcattacctataatgttaaatgcaacttgtgagactacttctaaaataacaggattaactttaccaggcataatagaagaaccattttgcattgaaggcagattgatttcagcaaaacctgtttttggaccgctagatagaagtcttaaatcatttgccattttagacaaattgactgcacatgtttttagaagtcctgatacacttacaaaacagtcaagattttgagtcgcatcaattaaatcatttgattgagttaaattaaggccgcaaatttttcttaaattaggagttatattatgaaaatattcaggacttacatttattgctgtaccaatagctgtgccccctatatttagaacaagcatatctttttcagcctcttttaagcgttctatatcacgttttatcatcgatgcaaaagcattgaatgattgtccaagtctaattggaactgcatcttgaagttgagtacgtcccattttaattatattattaaattctagggattttaatttaagagtattatataaacgttgaagctctgcaatagtttttggaagcatttttagaactgtaagttttccggctgtaggaaatacatcattagtagattgggccatatttacgtgatcatttgggtgtacaacattataactgcctttaatttctccaaggagttcaattgcacgattagctataacttcattagcattcatgttagcagaagttcctgcacctccttgaattgaatctactataaattcttcatgtaattttccacaaataatctcatcgcaagcatttattatagcattggcaatcgttgaagttaagaaatttgcatctctatttgtaatagcagcagctttttttatttcagcaagactaattataaattccttatttaatttcctttcagtaataggaaagttgtttttggctcttaatgattgaatgccgtaatatgcactggctggtacctccatagttcctattgagtctgattctatacgtgttttcatttaaaaattcctcgctttcataacttaaatcatttcaaaaatttaaaataatagattacttaaaataatttctaacaacaaaagataaatttataatcaagatatatctaccgttatttttttattaatctctatgactgaagattatcacgctttaaaatcaatgtaaatattagaaacaaaattgtgaataaaagctaaaaattagcataatacacttaaataaaattatagtagatataaaaatgcttaattttattaagtctgaaattttaaacaaaatgcgaacataagtattgaattatatctataaattcgtaatgttgctaaaattttagatgatgttttgcttaataataagaaaaaattcataaagacaataaaatagtataaaaattgtgaataaataaggaaaagtttgaaatatataagtagcgtaatagtttatactaaaatacaaagttaattttttaaatcaaaacctcaaaaagtacttgtaaatttctaataatcaccttaaaatataaatataacagataggcaatttgaataagtatgcaataagaatagattgctgaaaatttaataatagagcgcaaaggggcgtatcaataatcagaaactattaggattatttgatatgtttttttattctttaattttgctattataattaattcataaggagacagaggtatagtatatggacaagattgattttaagattattgaacttctacaagaaaatgctcgttatccactaaagcatttagcagaggaagtgtttttatcaactcccgcagtatcagcacgtattgaaaaattggaacaagcaggtgttataacaggatattctgcacacgttgatccactaaagttaggatataatattaaggcatttattaatttagaaatgacgcctaagcagaaaccagagttttatcctttcatatcaaattgcccaaatgtacttgagtgcaattgcgtaacaggcaagtattcaatgttaataaaggttgcttatcacacaactttagaattagatgcctttattggagaattacaaaagtttggaaatacggaaactcaaatagtcttctctacagcagttgagcatagaggaatagatgtgacatcagaaattggtgataaatagatttaagaaagaagactgtcctgaatataaacaagttttatatttagaacagtttttattattacaacataaaatatagaataatttagaaatctatatcatagaattgtaatggtataaatatatgtcaaggaaagtttctataagaaaataatttgggaattatatatatgtcgagttggagggaggaaatattgtgagtgaatatgaagaaaaattaaacgaaaataagaacataatattgagaaacattgagcaaggtaaaaaatcgggggttaataaagtttcagccgtttttgccataagtaaaagagatgagcttcgaaaaaacatggttacagatttggctacatggctaattactgatggatataaagtttctcttaaagaaggagaacttgagatattaactattgaatgggaataaagcagaaatttgtacaaaccctcaaaataagagggtttacatatatgctatataaaaagcatactatataaaagtaataacataaatatcaaagtcttaagcgcctaaacttataggtgctttttgttatgtgaataaataatgcaattttttcacaacaaaaagaattaatgcaaaaatattgttgttttgtagtcagatttgtgcgtttagagtaaaaagcatttttaaattttgaatgttgtgataacatttacagtataagaagtgaaatacttataaaattaacacttaatttaaattttttcttcagaatttgctacacaaattttactaacttaattgtattctatagaatattagaggggatgagaatggatggggaatataattaaaataaacatatattatgcagaatttacaagaaaaaataaaggcaaattaagattggaaacagtagaaaaatccattttgaggtatgataaatggttaaaggatacaaatagaaaagataatatagaaacttatgaggaatttttacgggctcagtaatactgacgggggatagtaagtgatattaatattacttactatcctttagcgtttctagtattagtttgtttattacatttggttggtatagcggaaaacaaaatatatagacataagtataagaaattttcataaatatattaatgtggatacatatatagataaatcagctataatctagacttaggcgcatgtctcgccgaaatgaataatatacttaaatttaaccactagaagttgtgtttaggtagaaacaaaaggacaagttatagatctataataaggaaatttaatatgtctttataaaattaataatctaaataagggagaggtttaaatggttaaagatgaatttaaaggtttagtaaaagagtataatgatgaaagttgttcgtggtgcaaaagtgaatctaactgcttttataaaagaaaggcaatggaggctactagagaagctataaaagaaatcacaatttgtacatcagcttattgcactgcaaaggtttcttgcgattattatagaagggacagcgagaaatacaatctttataatgttaaagaaggttaggaataattgataatttgatgaaaggtgctactttttattgtggtgccttttttatttaaaaaagttaagtattcaattaaagctggaatatagaacttcaatttaaatgtatgtttttatttggaattagctaagagtactagcaagaatataaatgattttgttaaataaattagcaaaaaatatatgctagataggaatatgtttaaatattactcatatacatctatattgtctgataatattataggactaatatatgaatgcgttatggagggcaatatgaaattcgactataatttattaattttactgctaattaatttctttttgttattcatagttataggtgtagtatttaaagtagttagaggctataaggcacatgtagacaggaataaaaaaattgaacagaaatttgatgagatattaaatgagtttataataaaaacattaaataatagtaaataaagcgttaatagaagaatatagctgctttaggcgaatattcaatgaatgacatgtaagtaaatccactaagtacttagagacatgcagtaatattaactaatacaagctatcaatactatttttgttaatatttttatagattatattttgtgttattggttaatatattactgccaaacaaaattaaaataaaaggaggtagattcaaatggcatcaaataatagtggaagcaatagaacattagtacctgaagcaaagcaaggtttaaacagattaaaaactgaggttgcatcagaaatcggattacaaaactatgaaaacatcgataaagggaacctatcttcaaggcaaaatggtagcgttggtggagaaatggtaaaaagaatgatagaaagctacgaacaagggttataaaaaataactatacaaaaaaggcgctcataggattatgagtgcctttttaattatctatggatttattattgaaaataaatctgtgggcaaattataaaaaatgtatattttataaaaggatacacaagaaaatatattatcatgtgatatcatgctataaaataatttcctctttttcatataattggttatatatttcgtttgattatatataattaattatatataaaggagggagacttatgttagacggtaaaaaagagatattaacaatgtttaaaaataaaaatgatgggttgacatttgaagaaatacacactaatgaaaaatttcagccagaggtatattttaaaaatggaaccttaactaaaataaatattttcttagttggagctttaaatcaaatggtgaatagtggcatacttgtttggagacaaggaaagtattacttaaaagaaaacgatataggttaattttctaattaagaataagcgaagaaaatggctctatacacaattttctttgcttatttaatgttctctttgaatatcaagcttctcctagaattttatatatgaattttgtaatatctggaaggcttaatccatcatgccctttttctggctcatagcgtaaaattatttcaatattattaaagttatcaatattattcatgcgttccatgcgtttcaataatggtactatctgggttgaattgtctgcatgagagcataaattagcgaggatatatatcttaggaacataattgtttttttcaaaagcatctactacgttaaatcgatcgttatatttttcaaaaggtttatcatcatcaaagcaaagtgttacaacagtttcgaatgcttccttaacaatccaattggagatgtcaaattgtgagttgtcgacaactactgatgatcctctaagatatatacccataattactgaaaggtaaccacctgctgatgtgccgtagataactgtattctcgagctgaatattcattttagcaatgatttgttttagtatcaagctactattttcaagataataattttcattttttcctacgccccaagcaacttgcaaatagccatttacataaagtgtaggatccatgcagaaaatagaggaggttttcaatatctgtgaccaactatgcctttggaaaattggtacattaacatttccgccgactacagcaccgttgttaaaaataataagtttatcatttccactttttctgtttattagatattcataaggtacaccattctgaatgactcttagtacatatatataatcgcttggtatttttaacttattaatttcagaataatctattgtgatttcagggtatggaagttttacatattttgcattgcttgtcctttgaatagtgttatcgattattaattcggtttttttaacttctgttataagatcataatcattgctaatattgaaaactctgttatatctataaggattgttcaaataccaaagtaaaattccaaataattctttttcatcaaagtgaatgatattgccgcatttgtatttttctaccagctctcttgctacaccaacatctgttgaaataataggagtatttagtattacgctttcaactaaagcaagagaaaaaccttcactaagagaagttaagattgttgctgttgagttttttatatacggatatggattttctacatatcctatcagttttacattttctgtaagttcgttgtcttctatatatttttgaagaattaatttgtaatccccatctcctaaaagataaatcataaaatcatcacgatatagcttaagttcttttgcagcttttaatagcaaaatttgatttttgttgaaatcaagtctaccaacagatgtaaagagcattttatccggtatactaattttttcgttacttaagatgttgattctctctctattaacagagttagaaattttaacaacattttcggttataccaaaaatctcggacaaagatttttctactacatctgaaattactactatagaatcaaattgctttaaaactgaagcctgcatttcgtgttcttgtttaatttgtctatattcattcgaattcttatctagccaattatagtcaagctcacgcatatcacctctaatccaaattatttttgttgcacaatttaaatatgaggcaaagtaagatggagcactatgattacaagcaataacacaatcatatttttcattaattagtttattgaaaagtaagggagatacaagtaatttataatagtaatcaagggaatctttttcgttatagtcctcctttgtggaatcaataagcgcatctaatattttaatattactattatagacatgggcattagaggttttaaataatggtaagatgcttatatcatatttatacttatctaatagatttaaaacatctgctaaagatttttctgttccatatccagaagttatattccaagttataaacaataattttttcattagttcaccttcttattagattatatgttgaggcaacggaattcagctttcctactaatatatgaaaagtaacatagttttgtgatttgcatgagtgtattaactaacgtattagaatacattgatataagttaaagaaaaagtggtagatataatttttattaaggcataaactaaattttgtgccactttattgatttaaatgaaacttgtaccaaatgcgcatgtaatataaaatattatcatagcaattaatacaggagatggtgatgtgggaaaagagtatataaaaaagttggcagtgttcagtataatagctacatcggttcttgccttaaatctaaacagagtaaatgcggaatggaaatatgatgtagatactggatggaattacgaaaaagaagattcttgtacaactgaagttgagaagacaaaatttagtgagttaattaagaattcaataggacaagagattttgaaaaatataagcgttcaaaattcatccttcaatatatatagtttaagtagcgatttagacataagcatcttaaattatgtaattcaagatgagatagataagctaaagattacgaatccgtatgagatgcttaatttagaagattacaacataagtatatcgggtgatagctctggcaagattgacataggaatttattgtacttatagaatgacaagagcgatggcaaatgaattagatgcaagagtgagagctatagttgcaaacattgcgccagatagtatgagtcaagctgaaaaagaacgtgctatacacgactggataattaataatacacgatatgatcaatctcatacaatatatgatccttataatacgctaattaaacatgtaggagtttgcgagggatactctttgctagcacaaaagatgtttactgttgctggaatcaaatcaatgattattgaaggtgttgctggtggagaagctcactcttggaacatggtttatatagataataaatggcatcatgttgattgtacatgggatgatccaatatcatctaatgatattttacagtacaactattataatttaacagatagtaaaatagcattagatcactcgtggaatgtaaataattacccaagggctaattaattgtaatagtttttaagtagattatcagaaaatatattgaagagtgatatgataaaaatgttaaatattcttataagatgttaagattaattattgaataaaaaagcaattgtgacaaagcaatacttaaatatatattgttaagatttaaaatacgggtagaggatataatttttatattagattatagtcctcttttttttgatttttttaataaaataaagtataattaaatgtatattaaaaaggagggcgaaatttgtggaattatttgaggtagggaaaccatttaaggatggtattacaaggtatccagaaggaataagtttcgatataaatgaaaatgggtgcaatttgttaatttatactacgaaatttacagaaaaatctagacaagctattataaaaggtgatttgaaatacggatatttcaaagaagataatgttattatcatgctattcagattcggtaatcaccaatggatagaagttccatattctatacatatgtgtaaaaattccgttcaattagaagaagttacagaaactgagggcttctctcttaatatatatattattaattcgggaacaggggttttagaagatactagacaagttgagcttgatattagattatctaaaatgttaagagatgatgttttagaacagaaaagtatgccatatagtggatttaatattagagtaagtgaatttaatagaaaatattcaactaaagcattagttagcatgtctagagcattagtttaaaataactttagatatgtatagttaactgatacttaaaattaagatatttttagtaaacaaaattgtaagatgtgtatatggtgcaataataaatttatatttaaaacgctggtaagctacgtgttaaattaaaaactagaatgtagaaatttaattgcaacatatacatacataaatattaaattatagaacggatgagtaagtataatattactttcataagctaattgctattcataagtctaatccctagattttagatattgaaataataattcttaatttatataattttagtaacagaaaggggtggaagctatgaaggttgagttttgtcttgtagaaagtgatgatattgtttttacaaaagaatctaaagatttgaaggatataataaatgtcattaccaaagtaggtacagagatcaatttgttttttagcaaagatgatttcatccatggttacgtacaaaatgtagcatatcaagttaatgcagaaagtaatgatgagagtctaataatatatttttcaaatgattataaaaaatctaagaacacagagagaatatcagctgaacatttaagtactacgaaaataagtgctaaaaataatgataaggcgtaatcggaaaaataataagtccatctgctaagcatgttttacagcattctgagtaagtaggttgtcatagtaattttgctattagataaatatacttacgtgtctaagaagaataagactggtattttgtacttgttattttcatttatatgcctaaataaaaattaaggtgagatagtaaatttatgatttgtttactattgtgccttaatttttttattctttaggaatttataatatgataaaattgtggacgatttaaaaaaggttgattgaataacttttgtattttaaaaagaataaaaataaataggaacatgtgctgtaattgaattttgtgctttatctttaaattgagtaacttttgagtactggaatattaagcataaatttattattacaatataattgaaatatatatattgcaattcacaatgcacatttcacaattcacaattgcggataaaattcttgtaataattttagaattatgatgaagaattatttttgcaacgtatatatctattatttataggtttaagttatttgaaaataatatattttaggatttaatatatacatattttataaatgttgccttgtgtgctataatttatatgaatttttgtttatgaattgtaatttttatgaagtatattaaaaatagtgaaggttacaagtaaaagcaggtgaactttgtgatacatataggctaaatatgaaagaaattatatatgaataaaattaaatttgtaactataaaaaataaagtttaagataaatttatgctttatattataaggagatatattatgaaagaaaaaaagaatagaaaaagatttaataatagcaggagaagtaattttataaaattagttaaaatagtatcacttttagttgtgattgggataattgcttttattgggattaataaaggaataaattcttttgctaatatggctattagtcaaaatagtgataaaaaagatgttatcgaaaacccttcagaggatgagaaaaaagagtttggggaagttccattaataaatgataatagaggcgtgccggtaatttgttttcattctataaatgatgatccttcagtaaaaagccctattattatttcaaaggataaatttagaacacaacttcaagctattaaagataatggatatacgacattaacaatggctcaacttaatgattacctttttaagggcaaggctattccagaaaaaagtgttgttctaacctttgatgatggatatagagataattatactaatgcatttcaaatcttaaaagagtttaatatgaatgcaacaatttttgttatacaaagttatttagatagagatggatatctaactactgaccaagttaaagagttgagtagtagtggaataattgatatagagtctcacacagtttctcatatcgatcttccgactatgtcatatgaagatcaattaaaagaactaaaaaattctaaggaaaagttagaaagtttaattaataagcctataatttccattgcttatccagaaggaaaatataatgatgatactaagaaagcttttagtgaagttggttattcaatgggatttaccactgaaagaggatatgctgacagagatgataattccgcagaattaaacagaatatgcgtagattatacatataagcctaaagacattctaaaggtattaaaaaacttgaaaaagtaatttgagattttcttttgaataagattaacaaaaatccgaacgaaaagaaaaaatatttacaaaacgttctcttaaaattgacaaaatataatataaattatagaataaagagagcaataaagatgcttattgtatattatccaattcaattagaattggataatatttttaataaggatcttaaaaataacttatgaatggagtagataagcatgaaagcaatattaacagtaattgggcaggacaaagttggtattatagcaggggttagtcagaaaatgttagaatatagtatcaatatattagatgttaatcaaactataatgcaaggtttttttaccatgataatggtactagactgcaaagatatgaatgcgacttttgaggaagttcgtgcaggacttacagcagagggtgaaagacttggggtagaagtaaagattcaaagagaagaaatatttaagtcaatgcattcactataataggaggggcttatgaatactaataatatacttgaaacgataaaaatgattgaggaagaaaaacttgatgttagaactataacaatgggaatatccttgcttgattgtatagatccagatggagataaagctagaattaagatatatgataaaattacaaaatctgcagagcatttagtagaggttggaaggcaaatagaaacagaatttggtattccaatagtaaataaaagagtttcaataactcctatgtcaataattgctggagctactaatgaaactagctatgttgaatttgcaagaactttagatagagcagcagagactcttggaatagatttcttaggtggattttcagcattagttcaaaaaggctgtacaaaaggtgataagattttaataagttcaattccagaagctttagcagtaacaaaaaaagtttgtgcatcagttaatgtaggatgcacaaaatcaggaataaacatgaacgctgtaagagatatggcggatgttataaagagaactgcagaacttacaaaagatcaaaaaggttttggttgcgctaagttagttgtatttgcaaatgcagtagaagataatccgtttatggcaggagctttccacggagttggagaagctgagagaattataaatgttggtgtaagcggaccaggcgttgttaagagagcgcttgagaaagttagaggagcatcttttgatgttgttgctgaaacaattaagcaaactgcatttaaagttacaaggatgggagaattagttgctaacgaagcgtctagaagattgaatgtgccttttggtatagttgacttatctttagctccaacaccagccgttggtgactcagttgcagaaattctagaagaaataggactagaacaagttggaactcatggtacaattgcggcacttgctatgcttaacgatgcagttaaaaaaggtggagttatggcatgtagccatgttggaggcctaagtggagctttcattccagtatctgaagatgcaggtatgattgatgcggttataagtggatcattaaatttagaaaaattagaaggaatgacatgtgtatgctcagttggtcttgatatgattgcaattcctggagatactccagcatctacgattgcgggaatgatagccgatgaagctgcaattggagtaataaataataagactacagcagttagaattataccagcaccaggttgtgaaatcggtgatatggtggagtttggtggattattgggtagagcacctgtaatgaaggtaaatggtaaatcatcagaattatttgctcaaagaggtggaagaattcctgcacctatacattcatttaaaaattaataaacataaaaataagacctacaagatattaaatatatctttaggtcttatttcatattctatattatttctaaaataagcaattatagaaatcttttcttttgtaatatcgaggtgtaaaaatagccttacagaataaaattagttagttgttttataataagaataataatggccataatgcccatgcattattaaaaccatatccaccatatccaccatatccgccataattgccgtatccgtaaaagtttccgtaattgtatccacagcaattattacaacatctgttataacagcatctactcatagttcatttctcctttgttaatctatatcatttgttatattaataatatattaaacataattaaaaattgttacatattaaacctaaaaataaaaatatttataagaataccgctgctacatttttatcatgaaaatttatgcaaataaggttttatagttatatatgctgggtcgaatagtttaaataaagtactttaatgctagaataattgaaaataatgtttaaaaagacatgaaattaataaataacataatacggatttagaatttggtatctttatgttataataggcaaagagaaaataagatgtgtatgattttttggaattaaaccataagaagaataagtaggtgaagatatgacaactgaaagaaagtttttgcccataagcaaaaaagatatgagagaaagaggctgggatcaattagatttcataattgttacagctgatgcatatattgatcatcatagtttcggtactgcaattatttccagagtacttgaagcaaatggatataaagttgggataataccgcaaccagattgggataatatttatgattttcagagatttgggaagcctaaatatgctttcttagttaatggtggaaacatggatcctatggtcaatcattatactgtaagtaaaagattaagagaaaaagatttttattctccaggtgggcaaatggggcttagacctgatagagcaacaattgtttattgcaataagataagagaagcttataaagatatagatattgtaataggaggaatagaagcaagtcttagaagatttgctcattacgattattggagtgataaagtaagaaaatcaatattaattgacagtacagctgacttgttgatttatggtatgggtgaaaaacaaatagtggccgttgcggaaagtttaaaaaataaagttcgagcaaaagatataacttatattagaggcacttgctatgctacagaaagtttagaagatgtgcaggattatattgaaattccttcgtataaggaagtatctacaaatagatataagtacgcagaagcaagcaaagtagaatatgaagaacaggattcggttcgaggccatattatcgtgcaaaagcatggaagtaaatatgtagttcaaaacattcctgaagcccctttaaacagagaagaattagatgaagtatatggacttccatatatgagagattaccatcctgtttatgaagggaaaggcggaatagctgcaattgaagaagttaaatttagtacagtaagttcaagaggctgttttggagattgtaaattttgtgctataacttttcatcaaggaagagttgttcaaagtagaagtaaagaatcaatattacaagaagttgaagatattacaaaacttccggattttaagggatatattcatgatgtaggagggccgactgcaaactttagaaaaccagcttgttctaagcagttagcttttggagcatgtaaaaataaagagtgtttatctccagatgtttgtagaaatatggatgtagatcatactgaataccttgatttgttaagatctataaggaaagtgccaaaggtcaaaaaggcattcgtgcgctcaggtcttaggtatgattatattatggctgataaagatgatacgttttttaaagaattagtagaacatcatgtaagcggaaaattaaaagttgcacctgagcatatttcaaaagatgtactaaaatatatgggtaaaccggctggtgaaacttatgataaatttgtaaataagtttgaaaaaataacaaagaaacttggaaaaaaacaatatataattccatatttaatgtcatcgcatccaggaagtactttagaatgtgcaattgagcttgctgagtacctaagagatattaactatcaaccagagcaggtacaagatttttatccaacaccaggtacattggctacaacaatgtattatactggattagatccaatgacaatgaaagaagtttatgtaccaaaaactaagcatgaaaaagctatgcaaagagctctgcttcaatataagaatccaaagtattatacactagtatatgaagcattaactcaagctggtagaactgatttgataggaaatggtccgaaatgtcttataaaagacaagaataaaagtgtgaaaggttataattctagtgtttctagaggtaatgaaagccaaggaactaataggaaaaaggcctcaggcagattaaaggatgatagaatttctgatagaagagaaaaaggtaagaaaacaaaagaaaaaaactcgactaatggcaaaaagaagactattaagaaaagataaaatagtaaatagtattgtaaatttgctgcaataaaagaatgaaatgtttttgtcaggtcttatatttagttcatgagttgtagcaatttactaatttaatcgatagtatatattgaaattaagaataagttactgatttatcagtgtgtacttgcatacatgctgaagttgaatttctacattttgattttaatttggtagttaacgtattaaagtgctagatgtggatttttattatttctgtataattaagagaaaggggtaaaaatgggggatattttaataaaagcgtttagctttatattgattattgcgataggatatagtttcaaaaggataggggtttttgggcctaaagactataaaattataactaaaattataatgaatattactttaccttgtgcacttgttactggatttgcaaattttaaaatggatacatcaatgctttttattattttgcttggatttttgggaaacattataatgtctttcgtgggttttgttttagctaggaataaggataataaagaaaaagcctttaatatgctaaatttagctggatataatataggatgttttacactcccatatgtacagagttttatgggagcatatgctgttgggataacaagtctcttcgatataggtaattcgattatgtgtacaggaggtacatatgcacttgcatcaggtgttgttggtgaagggaatgatcaaagtattagagcatttcttagaaaaattttctcatctgtaccgtttgatacttatatgcttatgtttatagtgacaattacaggtattaagttgccacaagtggtatatacaatcacttcaaatctaagtgcaggaaatgcttttttgtccatgcttatgattggcatggtttttgaatgcaaattccgaaaagaacagctagttaaagttgcatctattataagtatacgttacttgtttgcagcaatatttgcagttattatttatttttgtgtaccattttcaatggaaattaagcatgtactagttattttggtatttggcccagttcctgttcttgcaccagtctttacggctagatgtaaatgtgatgaaggcttggcaggggtagtaaattctttatgtatacctataagcataattataataactttattgttgtttatcattaattagtataatcgagaaagtaatattttgataaatagattaaaccactaggcataaaaagcatgtggtttttttgttatcttaataaattatttagtaacataacacgtatgttctaataataagtctgcatttaaaactctagccaaggttcaattaagtcaagtataatgtagaaacataattttaaaatatatagataatatttctaaaatattatataataataattattatttaaggttttaaggaggagatgaaattgaaaaaactaatctcatggaatgtaaatgggttaagagcctgcgtaaaaaaaggctttttagaatattttaaggaaatagatgctgatatattttgcatacaagaaagtaaacttcaagaaggtcaaatagatttagaactagatggatatacaagttactggaattatgctgaaaagaaaggatattcaggcactgctgtatttacaaaagaggagcctttaactataaaaagaggtattgggatagaagaacatgataacgaaggaagggtacttactttagagtatgataatttttacttagtaaatgtttatactcctaattctaagcaaggattagaaagacttgattatagaatggtatgggaagatgtgtttagaaaatatttaaaagaacttgagaaaaacaaacctgtaataatttgtggggatttaaatgttgcacataaagaaatagatttaaaaaatcctacatctaatagaaaaaatgcaggatttacagatgaggaaagatctaagataagtgaactattagaagcaggatttatagatacatatagatatttctatcctgataaagaaggcatgtactcatggtggtcatatagatttaatgctagagctaataatgctggatggagaatagattatttcttagtttcagaaagtcttaaggataaattagaagatgcaaaaattcatatggaagtaacaggatcagatcattgtccggttgagttgacaattaatctataataaataaaaaacaaagcataacaactatatttgagtagttggttatgctttgtttttttactcattgtacaataaatctttttatgcctatccaagcgataaagctggaaatgaaagatagtataccaaatgttagtatcaagaaaagcggaagtgatataggaaaaaagaaaatatgaattcctaatattagggcgcaagctaattcgcctaacaatgtatttcttatacatacaatacaaagtaatatagaatttttaaaaacatcttttagaggaagagaaacagtagtaagcaacggataaatatacatggatgaaagtgcaagtaaaactgtgatggaaagacataaatagaaaacaaaatagaaaatagatttctcttgagctaattttaaataaaaggatagtgaaacacctaaaaatgaaaatgcaattaatattattaatccactaaataatgattgtttccagttgtttttaaaggcttcatggaaatctgaaaaaatataagtatgctttctttggatcatagacattaaaattgaagtcatagcaccgaaagctggaccgattgtaataataggaatggaatataaaacgaagaaaaaattcaatttaattatatcccaaaatctcatagtaaataattcgaaaaataaatgtataccttcctttggaggctcgtccttttctataccaggaccttcacgttcgaaatttggggttaatagtttcatattaatcaatctcctcaaataaaatttatctcatattatttgtatgtttattttagataagtttaaagatagtatatcatttgaaaatttaaagttcaagattataaaaacatttacataccattaagaagttcattataatatataacatcttaagttttgtataaaaaggtcaaaatatgatttaaataaatctaaaatgatttaaacaaatataacttgaaagtattgactttaatagatataagtatataataaatttatgataataagttgcaacttaaaaataatgcatatgaaaaggattactagtggcaaaatatcgataaattaacaaaaggattaaataaactaaaaaaatatatacataaagtaatttaaaaggaatacaagtttattgatatactttaaaattagttaaaataaagagtgttttgtacaggctttgtttataaaagttattttgatcactgtttttaagggcatatatttaattaacaaaaatgaaatggtgttcactaaatatattaacttcaaataaaataatgggaggtaaaaatatgaaaagtgtaagaatattaaaaaaacttgcggctattgctgctgtaacatccattgctgcaacaatattaatcggatgtggtggaagtagttcaagtactagcacaggtggaggaaaggattcagcatcatctgcttcaggagatcagttagaaatgtggacatttattgagatgcataaaacgttttatgaaaagatgttagaaaaatggaatcagaaaaatcctgataagaagttaaatattaattttacagttcttccttatgatgatatgcataataaattgcaatctgcactcttgtccggacaaggagcccctgatgcatgtgatatagaagttggcaaattccctaattttcttaaaggagacccacaattagagaatcttgatgatgttatttcaccttataaagataagttggttaaatctcgtatagatctttacagtaaagatggacataattacggactaccaacacacgttggtgcatgtgtagcatattacaatactgaaatcttagaaaaggcggggattgattataaatctatagctacctgggatgattttaaagcagcaggtgctaaatattatgctgcaactggtaaaaactttggtactgctgatacaagtgctcaatggcaagaaagtcttatgctagcagaacaaaaatcagattttactgatgcggaaggtaagccacaattaaatagtccgcaaatggttaaagcacttactacgttaagagatttacaagatgcccatgcaatagctactattccaggtggacaacctgaccaaacagatgctgaaggtgcgataaataatggggactatgcagttgcaattatgcctctttggtatatgtcaagatttttacaatacatgcctgatcaagcaggtaaatgggcaattgctccggctccagtatttgaaaaaggtcaaccacgttctgtaggtttaggtggtacaggtacagctgtaactaaaacagctaagaataaagaaaatcttaaagaattcttagcatatgcaaaactttcagatgaaggtgaacaagcaatatgggaagatttaggcttcgatccatgcaatactgatttatggactaaaaatgatattactcataatccagaaaataagtttgtaaaatattttaagactaatccttttgatacattaaatgaaatcaaaaatgaaatacaattaattaaatcaaatgatgctattccaagtataaacaacgttttaaatacagttacattaaatagcatatttgaagataagaaagatataaaacaagcattagatgaagcacagcaacaagtagaaaatgaattgaaataattaaaaacatccacacagagaagctttttacaagcatattgaattacaaagatggcttctctgtattatttaagcgtgggaggaggaagttaagaagtggtaaagagatttatatataataaaaaagcagcaccatatgtatttatattaccatttattcttgtatttttactttttttcatatctccaatggtaaatacggtaataatgagctttgagaatgtattaccaggatcaagaaaatttgttgggtttgaaaattatacaaaactattaggtgataaggttttcttagttgcgttatggaacagctttaaatatatgatatggacattgatattgcttattccaattccaatgatacttgcatgtataatagacagcaaactaatggttggaaaagaattctttaaatctgcattatatttaccggctttaacatctgttgctgtggcaggtataatatttagatttgcttttggggaacaatctacttcattaatgaatcaggttgttgcgctatttggaatggatccatttaaatggctaaaaaatggaactacaggatttatagtattgctagtattggcatgttggagatggactggtgttaatatgttatatttcttatcaggacttaaaaacattcctgcggaattatatgaatcagctgatatagatggagcaaatacatggcaaaagtttagatatataacaatacctcaacttaaaccgacaacaatttatgtgcttactatatctatctacgcaggtcttgcaatgtttatagaaagttatatggtgtttaatggtaataactcgcctaataatataggtcttacaattgtaggatatttatatagacaaggtattgaaaaaaatgccatgggttatgcatctgcggtaggattagtattgtttattataggaatggctattaatttagtgcaattaaaactaaatggaacatttaagaaaggagattagtatgcaaagcaatattagtttgaataataaaaaaaatacacaaaaaaatgcagtaagtcatgtgaaaaatttgccaaaaagaatattaatttttatgctttttgcagtcatagctgtaatactactaattcccttttatacattatttgtttctacgttcaaggatggtgcattagtaatagcaaatggtatggatgtatcaatagatactgctaaaatgtcgtttaaaaattatataattctattcacagaaaaaaatagcttatttacatggttttttaatagtttattcttaactatagtgcaagtagtttgccaattatttatcagcgcatttgttgcatatggtttcgcaatgtatgattttaaaggaaagaattttctatttatatgtgttttattcgttatgatggtaccttttgagattttaatgttacctttatataaccaaataagtgatatgcatttaacaaatacctatattggaatcattttgccaactatagcaagtgcatcaactatatttttctttaggcaatacctctccggaataccaagagaccttgttgaggcaggtaggatagatggggcatcggaatatggtattttcttcagattaattttaccgattatgaagccatcttttgcggcaatggcaatattaaatgcaatgtttagttggaataacttattatggccaatgttagtgttgaaagatggtgcaaaatttactttaccaataggattaaatacattattaacaccttatggaaataactataatttattatttgtaggttctttcatttcagtaataccagtatttattttatttgcatgcttccaaaaatattttgtagaaggtatgacagctggagctgtaaagggttaatataattttcactaaggactagaaagtccaaactaaatacttaaggagatgaattataatggcaaaaaaagcaaaaatggtagtagacaaagactttaaaatatccgaaatagataaaagaatttatggttctttcattgaacatttaggaagggcagtatatggtgggatttatcagccaggccacatgtcagctgatgaaaatggcttccgcaccgatgtaatggaattagtaaaagaattagatgttccaattataagatacccaggtggtaattttgtatcaaatttcttttgggaagatagtgttggaccaatagcagaaaggccaaagagactagaattagcttggagaagcttagaaactaatgaaattggattaaacgaattctcaaagtggactaatgctgtaggatctgaaataatgatggcaataaatcttggaacaagaggaattgcagatgcctgcaatcttttagaatattgtaatcataaaggtggtacaaaatatagtgatttaagaataaaacatggtgttaaagaaccacataaaataaaaacatggtgtttaggaaatgaaatggatggaccatggcagataggacataaaacttctgaagagtatggaagattagctctagaaacaggtaaagctatgaaattaatagatccagatattgaattagtttcatgcggaagttcaaatacagccatgcctacgttccctgaatgggaagcatcaactcttgatcatacttacgatgttgtagattttatatcgcttcatcaatattatggtaatagattaaatgatactgcaaactttttagcacaaagtgatgatatggagcactttattaaaacagttacttcaacttgtgattatataaaagcaaaaaaacgtagtaaaaagactatgcacttaagcttcgatgaatggaatgtatggttccattctaataatgaagatgatgatataatgaagaatcatccatggcaaaaggcacctggacttttagaagatatgtataattttgaagatgcacttttagttggattaatgttaattgttttaatgaaacattctgatagagttaaaatggcatgcttagcgcaattggttaatgttatcgcaccaattatgacagaagaaaatggaccagcttggaagcagactatatactatccatatttgcatgcatctaaatacggtagaggaattgcgcttcaaccagtagtttcttcaccaaaacatgatactatagattttactgacgtaacagacgttgaatcgatagctgtatataatgaagaaaaggaagaagttacaatatttgcagttaatcgtaatttagaggaagatattgaattaacttgtgatgtaagaagttttgaaggatttaaaatcattgaacatattgtgttagagcatgataatatgaaaatagtgaattctccaacaggtgaagctgttactccaaaatctgtagatagaagcgatctggttgatggaattataacttcatctttaggaaaagcgtcgtggaatgtaattcgtttaggaaagaataaataaaataagaagtgatatttatgccttataaatatcacttcttatttattataaaaacagatataattcaatatattttaatatatattgcaaaaatgattcttcatgatgattctaaaaatattgcaataattttagttgcaattgtgaattgtgaaatgtgcattgtgaattgcaacatatatataattagatacaatgagaaacatcaagattcttgagttaatgtattataaacaagtcttacgcttatgccttgattgtaattgccaaagttttttccgaaaatagttaatccgccaacatgttttgtttcttctggaacagctaactttaaaagaatatcacttttataatttaattctaaatcttctagagtgacatcagaaatctttattccatcaataaaagttccgaaggaatttatggttaaaagttttaataatccgtattgattccaatgaggattccaccaagatggagtcaaaatacctttactatcaccaaaatctccaggactggtccatctaccaacattgacattatttaaatagaagtgtatatcagatggccatatgctgcatactccaggggcttctgaacttatttccatagatatttgcaattcagagaatacttcacttggttttaaatagttaggaattctatattctatacttcctttagtgaaccaaagaatatctgcattaattctttcaggatcagcaaagtaatttggattgtctacttctcctataatactatccttagttgcgatgccgcatgtaggggtaatatcataatttgaatagtgacctatatttaaatctatatgatatgaattttctacatcttgtttgccaatatcaattacaaatttatcctcgtgaagagaacatatcttttgcaatccatgctttccagttaaattagtcgtttttattaatccacactcttctaatttttttatatgcatagtaactgcaccattagttaaatcaagtttctctgataactcattcatatttaattgcttatactgtgataaaatctctaatatattcattcttacatccgaacttaaagctttgaaaagtggcaaactttcctttagatttgtaatgtgaatcataataatctcctctgtgttgttaatattagttgaattgaaattaatgttgaaatattaatttcagaaaaattgtacttaggttatagttcgttataaagttatcaaacgataatatgatatgttaagactattataccctttacatgattaaaagtgaataatcattttaaatatttttaaaataaagtcataatataaacaactactttttgttcaagttttttctaaaataggcatttttatattcagttggtgtgacatcttcaaattttttaaaaagtttcataaaatgcttatcatcattaaatccaacctgaagagcaatttcttttattgagaaagatgaatttaatagaagttgtttagaagcggaaattcttgttttattgatatattttaaaagggatataccagtatattttttaaatgccgaagaaagataatcctgattgtagttaaatgtttcggcaattttatgtgcagttaaatttgaagtataatttatatttatccaatttgcaatttcatttattttgcaattggtattagatagtttttcattttgatgaattatattatccatgaaatcttgagagatttccattgccaacaggcttaatgcataatttgttaaatattctgaataactctttttgcttgatagatcaagtagttgacgaaaaataaggcttgttcttgcagcagaagaaattgaaccatattcaggtaaaatgtaaacatctgaagaggctttttttaattcattatcaagattgaatatataatcattaatttgttcagcgtttaaaagcttatattcagcagaagtgattctaaaatgacaccaatagtaagaaagattcccttcagattttttataaccgtagtgggtatggaatggaaataatataataaacttatttggagtaagttcatattttttatcatcttgtgcaatgtacagagttccctcacagccaattagaataacaaaagtatccagatttcttttagaatgtataaaattttcattattaatcaattttccactagaacaatgagtaaggggatatttattatcagagacaaaataaaacatataggatttcaccacctattatactaaaatgaaagttgtttccatataataaatatactatagttatatgtataaaagctagtcatatgcttaaataatagcgtttgtattttagaggaatgaataaaatggtttttgataattataataaattaaccaccataaaaataaatttaggaggaattaataatgaactcaaatacttttagtaaacctttgcaaataaatcatataaatgtaaaagataatttttggaagaaaatgatggagctagcaagaactcatgtgattccttatcagtgggaagcattgaatgatagaatagaaggagcggagccaagttattgtatgcaaaattttaagattgcagctgggatgatggaaggtgaatttaaaggttttgtatttcaagatagtgattttgcaaaatggatagaagcggttggatattctcttatgtggaataaggatgaaggacttgaaaaaattgcagatggagcaattgatattgtctgtgcggcacagcagccagatggatacctagatacttattacattataaacggattagataaaagatggacaaacttacgtgataatcatgaattgtattgtttaggccatttgattgaaggggcagtagcttattatgaggcaactggaaaagataagttattaaatgcagtcgtaaaatatgtagactatgtggataccatatttggtccagaagatggcaaattgcatggatatccaggtcatgaagtaattgaattggccttaattaaactctataaaataaaaaaagataaaaaatatctaaatttagctaaatattttatagatgaaagaggcaaatcaccattatattttgaagaagaggggaaaaagtataataataagttctggtgggaagatagttactttaaatatcaatattatcaagcaggtaaaccagtaaaagagcaggaagttgcagaggggcatgctgtaagagctgtatatttatattcaggaatggctgatgtagcaagagaaacaaatgatgatgagctgctagaagcttgcaagcgcttatggagtaatatgactaaaaagcaaatgtatataacaggtggaattggatcatcacaatatggagaagcatttacttataattatgatttaccaaatgacactatttatgctgaaacttgcgcatctattggattagttttttttgcaagaagaatgcttgaaattgaacctaaatctcaatatgcagatataatggagaaagccttatacaacggaattataagcggaatgtcaattgatggaactaagtttttctatgtaaatccattagaggtagttccagaggcatctgaaaaagatcatttgagagcacatgtaaaagttgaacgtcaaaaatggtttggatgtgcatgctgtccgcctaatctagcaaggcttttgacttctataggaagttatgcatatacattaagagataatacaatatttatgcatttatacatgggaggagaaatatcagctaatttctctggaaagagtgtatcatttgatattaaaacaaactatccatgggatgagagtatagacattaatttaaatatgaaggaagaagctgactttgaatttgcattaagaattcctgaatggtgcagaaattatgaaataaaagttaatgaagaaaagataaatttcagtataatcgatgggtatgcttacgttaataggaaatggaaagatgctgataaaattaacattttatttaagatgcctgtagaaatagttagagcaaatataaacgtaagagaagacatgggaaaagttgctgtaatgagaggaccagttgtttattgcttagaggaagaagacaatggacctgatctgcacagagtttatttaaagagtaatcctaaatttacttatgaatatgacaaagatttcttaggtggcgcaatagtacttgaaagtgatgggctagtagttaaagagcaagattgtgataaagataagttatatgtatatgactctaaaattgaatttaatgaaaagaagttaaaatggattccatattatttatgggctaacagaacgccaggagaaatgatagtgtgggtaagaaaatgtatttagttcaataaagcttaaaattaagtaacttgtacgctgtttatgcagataaatatagtatataattttaaatgaacctaaagcaaaaaacataaacgtaggaggtactgaattttgaatgaaattttgactaaaacaatagaagaaatggcggatatggaatttgactgtagctgcggcaaaaaacatagagtagatataaaacatatctatgttggagaaaatgtatataatagaattctagatgtcgcaaaagaaattttaccaaaagaaatcttattggtcagtgataataatacttataaagcacttggcaagcgtgtagaaaatgaacttactgaatcaggttataagataaataatattatattagttagtgatggagatttaattccagatgaaaaagcaattggacgagtattggttgaagtaaataatgaaacagagcttatagttgctgtgggatctggaagtattaatgatatatgtagaataataagtgcaaaaactcatattccttatgttataatgggaacagctccatcaatggatggatatgcatcaacagtatcacctctaattattgatggagcaaaggtaacatatccagggactaatccatatgctattatagccgattcaaatattatgaaagatgctccatttgagatgatatgcgctggatttggtgatatactaggaaaatatacagcactttctgattggagattatctaatacgattcataacgaatatttttgtgatacaacagaaaagctagtaaggaatgctatgtataaatgttttgaaaatatagaaggagctgttaagagagatgttaaagcaatagaatatatatcagaagcacttatactatcaggaatagcaatgactctttcaggaaattcaagaccagcatcaggagcagaacaccatctttctcattattgggaaattgataaactttcaagaaaattagaacatcctttgcatggcaattcagttggagttggcacagtaatatcagcatggttgtataaaaagtttaatattgaagaaaggtttgggataaagactcctgtgccagaaataataataaatttattaaattctattggagctaagtctaatccaaaggcgttaggaattgagaaagaattatttcataggagtgtaattcatgctcttgaaatcagacctagatatacgattttgcaatatgcaaaaactgaaaatatgttagaagaatgtgcaaatgaattaacgaatttattttacggagaatgataatatgctaaaagataaaaaattatttttattagatattgatggtacaatagctttagatacaacattaatcgatggtacattagaatttatggattatgttttaagcataggcggtaaatatatatttataacaaataattcaacaaaaagtatagaagattatattatgaagtttgatgactttggaattaaagttgataaaacaagttttgtaacatcatcttatgcaaccgcaatatatctaaaagaagtatataaagataaaaaaatatttgttcttggaacaaaatcatttattaaagaactaaaaagatttgagcttaatattacagaagataaagatgaagatattgtttgtgcagtagtaggctttgacaatgaattaaattataaaaagatagaggatatatgtgaattactatcaacaagagatattgattatatagctactaatccagatcttgtttgtccgactagctttggttttgtaccagactgtggatcaatatgtgaaatgattgaaaatgcagttaaaagacaacctttatacattggaaagcctaataaaacgatagtggaaatgtgtctagaacaaactggatttacaaaggagcaaactttagttataggagatagattgtatacagacattgcctgcggtattaatggtggtgttgatacagctgtagtattcactggagaagcaacaaaggaagatttgaaagatacagaatttagaccaacatatagctttagtacaatcaaagagttatatgaaaagttagctttttaatatacttttagtaaagcaaggattacaagctgttaagaatgaaattcaaattttgtttttagcagcttttttatactgtagataataacattccatgatagttttggacttattatttattttatgtgcttaattaattatatacaatttgtttataataattattagaagaatataattttcatatcgctaagataatgattttgatataatatttttataacataactagataggaggagattataggatatgaatttagaatatattatgaataagttgaaagatgagaaaccatatattaatggctggaaaagaatgagaaggtcagctataattattccactagttgagattaataatgaagtacatgtattatttgaagttaggtctaaaaaattaaggagccagccaggagatatatgctttccaggtgggaaaatagatggaaatgaatctcctaaggaagctgcacttagagaaatatccgaagaacttggcgtaaaaagtattaatatagtaaatgaattagatactatagtaagatatgatggaataataatccatccgtatgtaggaattattaaagatcttgatgaaataaagataagtgaagatgaggttgatcatgtgttttatgtaccgttatcctatcttttagataataagcctcgtgtatataataataaaataaatattgagagagataaggaatttccatatgatttaattgttaatagggaaaactataaatttagagaagctaattatagatctttattttataaatatgaaacttataatatatggggaataacagctgagatgctgcaagattttttagaaaatttgtaattaaccataaaaaatgaatcatttctatcaacatcataacaattcccataaaaattagtttttttactctaaactttgcaggaatagctatattgcttgggaatatgtataaacaggaattaacgaaagaagtctagagctgagagtaaatcttggctcttttttcatacctaaaaatagagctaggggataagtaagattggatcaagtaggaagctacagacaaatacattaatggattatggagaatgatagggttttaagatgataattaaaaattatattattgtacagcattaatatgatggttgggagtaaggagaaaaattaaatataaatataatgaaagaaacaagtattattagatagtgataaatttatttatatttaatgaaaataattgtaaggaaatgatataatttacataaagcgaaacgaaattataatttgtatgataggtggaattaataattgtttgtaaatgaaattctctgataccacgatttaagttataacaatatatgtgtaatatttaagtcaaaagaatcaaagctattttacggcaatatttatgagtcgtgaatatagaaaaatgtgtattggggaaaatattatataaataatattaaagaaaaaacaaatttatacaggaagagaatttaaagtaagaatataattataaaatttttggaggtaagtatggagcaaaaaagagttgcaggagaaaaatcaacagaatatataaaagatggaatgatattaggattaggaactggttcaacagcttattatatgattaaaaaagttggagaattgattaaaaatggaatgaagataaaagctgtagcaacatcaaaaagtactgagagttttgcaagagaacttaagattcctttattatcaattgatgaagttgataggattgatttggcaattgatggcgtagacgaaatagataatgaatttaatgccattaaaggtggaggaggagccttatttagagaaaaaattgtggctagtttggccaatgaagttatatggattatggatgaaagtaaattagttgatggtattggagaatttcctttaccagttgaaatattaccatatggatacaaacatgtaattaaagaattacagaattattcattaaatccccaaataagaatgaaggaagaagagatttttgtaactgataatggtaactatatagttgatttgcatataggaaagccaatgaacattaatgatgtttataataaagttaataaaataactggggtactagaaacaggattatttattaatatgtgtgatcgtattattattggcacaagcagtggcgccaagattataaataatatcaagagccaaaatgtaaaggtggattaatccacataaagactatttcattttagaatgtacggagggggatgatgatatgataagggaaataataaatgaagattttaatggattaatgcaattatatatgcaacttcatgatgaatctatgccagagaaaacaccagaaataatggaagtatggaatagaattttggaagataaagaacatcatcttattattgcagaggaagaaggaaagatagtgtcttcgtgtgtttgtgtcataataccaaatttgacacacaatcaacgaccatatgcatttattgaaaatgtagtgactgataaacattatagaaataaaggattagcaacagcttgtttgaattacgcaaaagaaatagcacttaaagagaagtgttataaattaatgttattaactggctccaagaaagaaagtacgctaaatttctatgaacaagcaggatataatcaaaatgataaaactgctttcatacagtggatataatataaattgcaatttatctgagaatgtataatttttttgcataagagtatgacattataaaactataaatttgagggataaagataattttgaaattaaagattcgagtttctgttatagtataaataaatgcaaatagtttttatataaggagaaaagagatggtttatttaaattattttacattccctgatgaggatatggaatttaactttttcatgggggtaaaaagaacttgttatgactctttttatccatttaaggtattgtcacaacatggtcttagaagaattgattttgaaccagttactattttatatggaggaaatggttctggaaaatcaacagcgttaaatgttatagcagaaaaaataggagtaagccgtgattctatctataataaatctaatttttttcctgattatgtgaatatgtgtgatatatgtgttgaaacagatattcctaaaaatagtaggattattactagtgatgatgtatttgattatatcttaaatattcgtagcataaatgaaggaattgacataaagagagaaaagctttttgaagaatatttggagtctaaatattctcgcttccaaatgaagtcgatggcagattatgaacaattaaaaaaagtaaatactgctaggagtaaaacgcaatcaaaatttgtgaaaaatagattaatggataatttcagagaatattcaaatggagaaagtgcatttatatattttactgaaaaaattgatgagaatggactgtatatattggatgaacctgaaaatagtctttcgccaaaacgtcaaatggaattaatgaattttattgaggactctgcgcggtttttaagatgtcagtttattatatcaacgcactcaccatttatacttgctatgaaaggcgcgaaaatatatgatctcgatgaaaatcctgttgatgtaaaacggtggacagaattggagaatgtgcgtacatattatgactttttcaaaatgcatgaaaaagagtttaaataataaaagatgggagtattagagtgaataaggaatttttagaatctcatctaattatagaagaaagagatttatgacagaggctttagaaacattaataagatgggtgggtaaatttcaagtgggtaaaagtataacagcaagagctttaaaaacgaattttggttctattaaagtattaaataattgtaattttgagttattcagctctactgagcaagagaatatttatattaataagcttagataaaattatgtggcttttgatgttaagcatatcttaacgaaagcagttccaatggcaactgagcgcataaatgcattaatgaagatgggatataagccaattaacaaaaaatttattatatatgatgattattactgtagagaaatttaatattaaaaacaatataaagaataatatgaaacttatttttttagagcttaggcataatcaaaaaaataagaagtccatctgccaagcctattttccaccatgctacatcagtaaattgccctcatagacctgctatgagactaatttacttccttgcctggcgaaaaataatcatagtattttggaattgttattttttttcatgtgccttaaaattataaaaattctaagctcttaattaattataaaattaattattgaaaatctcctttgcaaccgctacagcatttaatacctttggaaaaccgacatatggaatgcattgtaagaatacttctattatttcttctttagagatcccaacgtttaatgctccattaatatgaacttttaattggttttcgcaccctcctagtgtagtaagagcagataaagtaacaagttccctttgttttaaatcaaatgttggtcttgtataaatatctccaaaagcaaattcaataatgtattttccaaggtctggagctatatccttaagtgattctattacagctgttccagcgtttccatcaacctcgttaagtttatttagccctttttcatatctattttccataattgtaatacctcctactttttgataatattatcatatatgctggagttaactccatgtcaagaggtaggtgattattttgaattattatataggagagttttctgaaaaaattggtttgagcattgatactttaagatattatgaaaagcttggtctgatttatcctgaaagagatgaagcaaataaaagaatatattctgaaaaagatattgagtggctaaaatttataattcgattaaaggaaataaatatgcctattaagcagatacaatactattctaaattgagatatgatggcgatgatacaattaaggaaagattagaattacttgaagaacaaatggacaggttaaatattgaaaaaagaaaaattgaagaaaatataatacacttggataaaaagattagtatttataagaaaatgatagataaaaaataaataatgtctgttaatttaatttttatgaaataatatatgggaggattgaaatgagtaatatgcaagcaattatatggctttttcctataatatttattatccatgattttgaagaaataatttttatacaatcatggataagtaaaaataggtgttatttatgtgaaaagtttccaaagttatcaaaaaagttattgcctcatttcgataatattacaacagcatcttttgcatttggggttgctgaagaatttattttaattatcataattactattatttcgtataaagcagattggcttaatttatggattggcctatttattgcttttactacacatttaataatacattgttttcaagcattaataataagaaaatatgttccagcaattgttacaagcattatctttttgccaatttgtattaatattattaagagtatagccaaagtgtatacatcaaatattattatttcatattctattttgggactcataattatgttagtgaatttatatattgctcacaaatgtatggatttatttgccaagcagttattgaggtataagcattgaaagaaaatttatatatatgttgcaattcacaatgcacatttcacaatgcacaatttcagctaaaattcttgcgatatttttagaattatgatgaagaattatttttgcaatatatatatgtagtacattttaatttttataattttagttttatctaagctatttaggtattagaattttaaatgtaaattaactattacaacatatataatagttattactttattgttgaggtagataaacttaatctgtaagtaccatattccataattttatcaagtaataaattaatttcatccatattagagcatatgactttaagcaaatagcagccatctccactaatcctatgtgcctcagttataattgtattttctttaataaattttgttaatttatcatgttttgtggttttcatgaaaatagtaataaatgcagtaatgtttttgcctagcagagaattattaatgcatacagtatactgtgttattatacctaaatcctgaagtcgtataattctattggatactccttgaggggttagatgtacatgctcaccaatttccttaagtggtatttttgaattaatcaatagcatgtctaaaatcttcaagtctacttcatcaaacatagagcataaaatcctttcatttttaaagagaaactaatgaatctctttcacatttcaaccttaatttaagatactattagtatagcaaatataagtaaatcagcaaatataaaggtggaatgaaaatgaaaaaagcattactagtaattgatgtgcaaaatgaatattttacaggtaaactaaaagtaacttatcctaataatagctttgataatatattaaaggtaatggattatgcaaaagagaataatatgattgttataattgtacagcatacagcaatttttggagacacatttattaagaattcaaatggatggaaactacacccaatgattcttgagaaatcatacgactatcttattgagaaaactaagccaagcagtttttatgaaacaaatttagaagaaatattaaaaaaagaaaatataactgagatagttatttcaggatatatgactcaaatgtgctgtgacacgacagcaagggaagctttccatagaggctaccacgttgacttcttatcagatgctacaggaactatagatgtaaataatgaagtaggtgttataagtagtaaagatcttcacaaagctactttaattgctcaaagtttaaaatttagtaatgtaataagtactatggaatggatgaaattatctaacatttaattttgcatagtacttatattataaatagaatatgaattatatctataaatgatgctagggttaaaagttgctttctttgttacttctaaccctattatttttctagctagaaaagtataaatgtttagccttaaaaaatgtttatagatctgagaagtatagagtggtcaaagttcagctaattaagaattcacagctattttattctctttagtttaaggatcttatattgtctacataaaattacaaatatgaaaagtgagcaataaaagattttaaaatttactaaagaaaccattttataattttaataaacgtttatttatgatattgttattttatctcttatgaaaagctatacaaaaatatattgacttagaaaaagaacaaatatagaataacattattaaaggacatttaaaaagtggttttataattctatatatttcatcaattttattaaaaaggagattttgttaatgaaatacttaaagggcgttttggtcattatacttattgctctttttttagggagcaatttatattttattaacttgttgagggacaagaaagtagaaaaagaaccgataaaacctaaaatagtgttgatttcacatataaagactaatccatattggcttgatataaaggctggcgcggaaagagcggctaaagaaagaggtgcagtggttgaatttttaggacctacaactgcaagcactgaagatgggctaaaactttttgatatggctacatcagctaaggtgagtggcataataacatatgttcaagaagaaggacaatataaaaagaaaatcaatagcgcaatggaaaagggtattccagtagtcacaatagattcagatgaagaagatagcaatagaatagcatatgttggcacagataatgttttagctggacaagttgcaggaaaggaaatggtcaagcaaataggaacgtctggaaatgtagcaatagtaatgggaggaaaaaacgtaaaaaatcagaaagaaagggtagaaggctttacagaatatataaaatcgaattctaacttgaaaattgtggatacagattcatcggatgcaatgcttcttgaggcagaaattataacaagaaaaatattaaatagaaatgataacataaatgctttattttgcacctcagctcttgatggaataggcgctgcaagagcagtaaaagatttaaattataaagatagggtaaaaattatatgttttgatgatttggatgatactttaagcaatattagaaatggactagtttcagcaacaatagttcagaaaagtaatgaaatgggttatagggcagttagcattattatggacaaaattgaagggaaatcaaataagttttcaaaatcactaatcgatgtaaatgtaattaataagagtaatatagacagttataggcgaggagatgataaagttgaaaactaaaagcttaaatagtaaatttataatatttgttatatgcttaattattccaatatgcatatgcaatattatatccctggcgatgagtaaaaaaattgaggacgggtatgttaatatgcttaacaatatgctcattactaatgaaattaagcagcatgttgatagttctttagataattttaatcaatatatattgaatggaactccaagtaaaaaagaaagttatagtaatgaggtgattcttgcaaaacaaaaaattggcaagcttaaaaaaaattctgatgatgtgaatcaatatattttaagagatctagacaatactgtagattcttatatagaaagttctaaaaatacaatatctgcttatgaaaataaggagggatatattttttactatgatgattttgtagcggccaagaatattgcatcatattgtgatgcatatgcatctactttaatgcaaaatttcctagaggctaatagcatagcatataaagaactaaatagaaatagcagcgtaatatatataggactagctacatatcttatattaattttagctttatgtgtagtttatgcactaacatttataagacatatatctgagggtttaaagggcatggttgaaatatcgaacaaagtgtcaaaaggtcaatttgaatattatgaaggtaacaaaactgacatttatgagttggatattctaacaaaaacatttaataccatgattacagatataaaaaatcttattagctctcttaatggaaagatcctattagagaaaaaattaaaagaggaggagatgaaaaatctaaaatatgagaacgctttaaaagaatttgatttaaaggtattacagtctcaaataaacccacatttcttatttaataccctaaattgtataaacgcgacagcaataatggaaaatgcgataactacaagtaaattaattaaatcagtatctaatattttaagatattctttaagaagtatgagtacgaatgcactattggaagatgaaataaatattgtaaaggattatatttatattcaggaatgcaggtttgatgatagggtgaaatttaatctgagtacaaatatggatatgaaaaaagttaaagttcccggaatgacaatacaaccattagtagaaaatgcatttatacatgggattgaagggaaagaagatggtggatatataaatatatatattgatgaggaaaatggtgagtgtaatgttttaattgaagataatggtgttggaatttctaaagaagttttggataagattaataattataattatgatgcaaaacatacagggcatacaacaggtcttggaataaatatagtagaaaagaggcttagatatttatataacaagaaaaatatgtttaaagtagaaagtgaagaaggcaaagggactaaagtttatttgaaaatacctataatgggggatgagaataatgatgaaaatattaattgctgatgatgaaaagtatgatagggagaccgttaaacatataataaaagagaattttttaggagagttagaaatatacgaagccaaaaatgggagagaagcaattgaactatctgaaagcatcagaccagatatagttattattgatataaaaatgccaggtattgatggaatacaggcattgaaagaaatgacagcaactttaccaaatttatatagcataattttgacagcatatgattattttgattttgcattggaagccgtaaaaataaatgtgaaagaatatcttctaaagccatttaccaaggaggagattatagaaaaaattgctgtgggaattaaatgggtgaaaaaagaacaggagaaaagaaaaagtgaaattgaagataaagagaaaatatataccttattgcctgtgcttgaaaatcaattaagtgatctaataatcaatgataaacttaaaggcgttgattatggaatgtatctgcaatgtttagatatgagttttttgaatagctatgcaatggttatttcaataaaagataagtatgcgtataaagatattagcagagtagaaagagatcaaattaggattaagataggagaatatgttaaggaatatattaatagaagatataaatgcataggaaattatgtattttatgaagaattaacgtattttatacaaatagataatgaagaaaccgaagattttaagagtctagaaattgatcttgcatttaatttgagaagagaaataaaaaagagatttaatatttcaataagagcaggtctcggagaaatatttgattcagtagagcaaatagtggaatcttatagacaagctatgaagtgtttagtatacaactcagacaatgtaaatattatttatattgatgacatagaaggaaaattgatgaatgatagtttttcaggtggtatatcaggggatacaaagttgggtaaaaataaaaattcaaacaaaataaagatgaaactatttgaaagtgtaaaacaatttattagagaaaatattgaaacagaattagagttagagaaggtagcaaataattttggattaagtgtctattattttagcaggacatttaaagaagtgacaggcattaatttttcggaatatgtaaataaatgcagaatagatgttgcaaaggaattactttcaactggagaaatgaatgtgaaagaggtttgttacaaagtaggatacaatgatcctaattatttcagcaaagtatttaagaaatatgaaggagttagtcctgcaaattttaaaggaaatatggaagaaaagattttttaaaattaattagtgaaagatatgttacttattattcaggaattttttaatttataaaaagcaatatattaccaacaacatatcacagtaataaaaaaatccagactatttcttatatttagagattagtctggattttctttatgttttaaattatttactagtaaaaatttgctgtaaaaagatagcaatataagattataaattagcaaatcagtctatttgaaacgtttactttaatgtatataattaagactgtaaaagagatctatattaaaaaaaaggggagaaaaagatgaaatctaaaaaaatgattaaattattaggtttggcactaagtggggtactaatattttcagcattgacaggatgtggagcaaaaaaagatgcacaaacatctagcaatggaaataagaaaataaaaattggtgtaagtatggatgacctaagacttgaaagatggcaacatgataaggaaatctttgaagaagaagctaagaagcttggagcagatgttgttttccaatctgcaaatggtgatgatccaacacaaatgtcacaagcagagaatcttatatctcaaggggtagatgtcttagttgtaataccacataacggtgaatcaatagcaccaattgtagaagaagctcatcaaaataaaataaaagtattggcttacgatagactaattacaaatagtgacttagattactatgtatcttttgataatgtaaaagttggagaattacaagctaaagctatcgtggataaaactccaaaaggtaattatttcatgatgggaggatctccaacagacaataatgcaaaattatttagacaaggacaaatgaacataatacaaccttatgtagataagggagatataaaacttgtaggtgatcaatgggtaaaagattggtcagcagaagaagcattaaagataatggaaaatgctttgacagcaaataataacaaacttgatgcggtagttgcatcaaatgatagtacagcaggtggtgctattcaagcattacaagcacaaagcttagcaggaaaaattacaatctctggacaagatgcagatttagctggttgccaaagagttgttgagggaactcaaacaatgacaatatacaaaccaataaaagatattgctgcaaaagctgctgaaatggctgtaaagatggctaaaggtgaagatattgaaacaggtggtactgtaactaacaatggtaaaaaagatgtcccttcagtattacttactccaatagcagttacagcagataacatgaaggatactgtaattaaagatggtttccaaaagtttgatgatgtatataaaaatgtaccagaagataaaagaccaagcaaataaataagaatattggagtctgaagatattatttcaggctccaatatagaaaggagataagcatttcatgagtgagtatattttagaaatgagagatatagtcaaagaattctttggagtaaaggcattagatggagtaactttaaaagttaaaaagggagaaatccatgctctttgtggtgaaaatggagcaggaaaatccacactgatgaaagttttgagcggagagcatcctgctgggtcttactctggtaaaataatttttgaaggaaaagaattaaatcaaacaagtataaaagattctgaaagcgttggtattgcaattattcatcaggaattagcacttataaaacaattatctatagcagaaaatatttttttaggaaatgaaattggcgcacgtggactagtaaattttagtgaacagttaaataagacaaatgaattattaaatagggttaagctgaatgttaatccgcttactagagcgggagatcttggaattggacatcagcaattagttgaaattgcaaaagctctatctaaaaatgcaaaactattgattcttgacgaaccttctgcttctttaagtgaaggtgaagtagaagtgttaatgggaatattagatgatttaagaagagatggagtaacatgtatttatatttctcacaaacttaatgaggttacaagaatatgtgacaatgttactgtaattagagatggctcaacaataggacaagttcctattagtgagatagatcaagataagctagtacaaatgatggttggaagagaaatgaaaaatctatttcctagagaagaacataaaataggcgaagaattttttgagataaagaattttaacgttttagatccatttaataagaacataaaaagagtaaaaaatgcgagttttaccttaagacgtggagagatacttggaatttcaggcctagtaggttcaggtagaacagaaatggtggcaagcatatatggaagtttccaaggtcaaaagagcggtgaaatatattttgagggtaaaaaaattgacataaaaaatccaaatgatgctttaagcaaaggaatagctatggttccagaagatagaaaaaaagatggaataattgcgggtatgagtgtagctaaaaatatgacaatgagcaatttagtgaaatataaaaggccattaaacgtaatagataaagataaggaaatgatggatgttttaaaatttattgatgaaataaaaataaagactgcatcaactgaattagcaataaaaaatctaagtggtggaaatcaacaaaaagtaatactagcaaaaaatcttcttgctgaacctaaaatattaatattagatgaacctactagaggaattgatgttggagctaagtatgaaatttataagttaatattcaagctagctaaacaaggaatatctataataatggtttcatcagaacttccagaagtacttggaattagtgatagggttctagtaatgaatgaaggagaaatcaaggcaagtcttgagaataatgggttaactcaagagatgatcatgaattattctgtaggaaagaaaaatgaagacattagtgagagttatagcgaagaaactaaaacttctgtaggaggaatataagatgcaattaagtaaaagtacaagttcagaaaaagaaaagaaattaggtttaaacgttatatttaaatctaagatgacagcaatattaatagcaacagcggcaatatgggttttgtttacgtttttaacagatggaaactttttgacaacaagaaacttatcaaatttatttagacaaatgtcaattactggtgtacttgcaataggcatggtttttgtaatcattttaggtgagatagatctttcagcaggatcaactttaggactgcttggaggaattgcagcaatattaaatgtttggtttggattttcagctattccaacagtagtaataacattaatacttggagttattatgggtgcttggaatggatattggatagcatttagaaatgttccatcatttatagttactttagcaagtatgcttgttttcagaggtatattaataggaattacaggtggtaatacagttgcgccattaacagcagattttaaagctataggacaagcatatttaccaacagttgtaggttatatattagtagcaatagcgattgtaggttcagcatatttaatattaggaaatagaaaaaataagattaaatataatattgaagttagaccaatggctttagatgtacttacaatagtaggaattggtgttatatcattagtgctagtactaattcttaatgactatcaaggatttcctataccagttttcattatgttacttttagctttaatactagcatttgtaggaacaaagactatatttggtagaagaatatatggaattggtggaaatagagatgcagcaagattatcaggtataaacgtaaagaaacatattattgttatatattcagtacttggattactttgtgcagttgccggaatattacttacaacaagattaaatgcaggatcagtttcagctggtcaaaatgcagaaatggatgcaattgcatcatgcgttatcggtggagcaagtttagctggtggtagtggtacagttgctggagcattagttggtgcacttgtaatggctagtatagataacggtatgagtatgatgaatactccaacattctggcaatacatcgttaaaggtttaatattactaatagcagtatggatggatatatcatctaaaaacaagaaataattctttgaaaatgattatatattcttaataaaaactttatataaattagtgacgacaaatcattagaataacagcaggctataattaatattgtctgctgttatctgtatatatggtatattaattctatattttgtttaacataaaaaggtatgaaaaggacataattataatgaattattttattaaaaaataacataaaaatgtgctcagaaaactattgactatataaaaaaaagaaagtattataagcttataaaacaacatttaaaaagttatttcaaaatatattttaagtagtgaatatcaaaagaataagtactttaacttactttaataattattttgattgaagcttgttatacaaaataaaattcagaatattcattaaaatcaaacaactttgatttatatataagggctagttattactaacgttggcttttataaatagatagataaatggcttaataagttattacgctatttactagaaataatttatattcaatatagaaaaatgaggagggtatcatatgagagaatactttgaaaatgtttcgaaaataaattacgagggggcaaattctaaaaatccatattcatttaaatattataatccagacgaaattattggggataaagcaatgaaagaacatctaagatttgccttatcttattggcacacattaacagctaatggagcagatccatttggtgtagggactatgattcgtccatgggatagcgaaacaaatgaaatggatttggctaaagcaagaatggaagcagcatttgaattaatggataaactaaacatagaatatttttgcttccatgatagagatatagcaccagaaggaaaaacattacaagaaactaataaaaatttagatgagatagttgagttgtgcaaaagtttaatgaaaaagtataataagaaacttttatggggaacagcaaactgttttactaatccaaggtatgttcatggtgcaggtactagctgcaatgcggatgtatttgcttatgcagcagcacaaattaaaaaagcaattgaaataacaaaagagttaaatggagaaaactatgttttttggggtggacgtgaaggatatgaaactctattaaatacagatatgggattagaattagataactttgctagattacttcaaatggctgttgattatgctaaagaaataggatttacaggacaatttttaatagagccaaaaccaaaggaaccaacaaagcaccaatatgattttgatacagcaacagttttagggttccttaaaaattataaccttgataagtattttaaagttaacattgaagcaaatcatgctactttggcacaacacacattccaacatgaacttcattttgcaagaatcaataatttcttaggcagcatagatgctaatcaaggagatccgttgcttggatgggatacagatcaatttccaacaaatatatatgatgctacattagctatgtatgaaatccttaaaaatggagggcttgcaccaggtggtgttaactttgattctaaagttagaagggcatcatttgaaaaagaagatttattcctagcttatatagctggaatggatacatttgctaaaggattgagagtagcctataaacttttagaaaatggtgatttagaagactttataaaagaaaaatattcaagctttacacaaggaatcggtaaagaaattgttgaaggaaaagttggctttaaagaattagaagcatatgcgttaaacaataaccctataataaataaatctggaagacaagagttattagaatctatagttaatcaatatatatttgaggatcataaataaataaataatatgtaatctagatttattcatctcaccaaaataagaagcatgcttttattccgacttgtacgggattttatggatgattctaagattagaagttgtacccaaaggctagccttaaaggtaagctctaagtaaatacatttgaaaaaacttctaacttgtaaatttatagttaaaagaacttcttgtaatattttttagtattattattgcaagaagttcctttttatttaagactctatttgattagatattttataataagagtaactttctaaatacaaaaataactagtaaaataaaaaatgaaaatgtattcaaaaaactattgaccgcgatgaaaaagggaagtataataaacttattaaaatacatttaaaaagttatttaaaaaattgagtaaaaagtttgtaattatgttaatttagaaaagatatataacttaggaggtttattaatgagatatttattaggattggatattggaacatcaggaacaaagacagctctttttgatgaaaatggaactacaataaaaactgcaacttatggatatgatttattccaaccacaagtaggatgggcagaacaagatccagaagattggtggcaggcatgtgtaaagggaataaaagatgttattgaaaaaagtggtgtacaagcttctgatattaaaggtattggattaagcgggcaaatgcatgggcttgttatggtagataaagatcttaatgtaattagaaattctataatctggtgtgatcaaagaactgaaaaagaatgtgattacatgacagaagtaatcggaaaagaaagactaattaagatcactggtaatcctgcattaactggatttactctttcaaaattattgtgggttagaaataatgaaccagaaaactataataaaatttacaaaatacttcttccaaaagattatattagacttaaattgactaatgtttttgcaactgaagtttcagatgctagtggtatgcaaatgttagatataaatactagaaattggagcgaagaattacttaatgagttaaacatagataaaaacatattagcagatgtttatgaatcagtagttgttagtggaaaagttacagaagaagttgcaaaattaacaaacttagcagtagatacaccagttgttggtggtgctggagaccaagcagcaggagcaataggaaatggaatagtaagagaaggaataatatcaacaacaataggtacttcaggagtagtatttgcagcaactgatacacctagatttgataaagaaggaagagttcatactttgtgtcatgcagtaccaggtaagtggcatataatgggtgttactcaaggagctggtctatcattaaactggtttaaaagaacattctgtgctaaagaagttgaagaaagcgagaaattaggacgagatatctatgatttattgactgaaaaagcagcaaaatcaaagcctggttctaatggaattgtttacttaccatatcttatgggagaaagaacacctcatatagaccctaatgtaaaaggtgcatttttaggagtatcactaataaataaccatgatgattttgtacgtagtatattagaaggtgttagctttagtttgaaaaactgccttgatttaatcgaagacatgaatgtaaacattgatgagataagagtaagtggcggtggagcagaaagtgctgtatggagacaaatattagctgatattttccaatattcattaactacagttaaagcatctgaaggcggtgcgcttggagttgcaatactagcaggggttggagcaggaatctatgattctgtagaagatgcttgtgatagaatcgtaaaaggaaacaagaaagtttctccaaatgaagaattaaaagaagtatactcaaaagtatatgaaacatataattcagcttatccaagaataaaagatatttaaattatattaaagataaaaatccatcatcttagttaagtatttatataattaattaatggtgtgtagtagtatcgaattttagcaaaaaaattatatagttttttaaatactttaacaaaaataataatagtgatattatttaagaaaaagctactattactgataatagtcgagaggagtattttaaagtttgatagaagtaaatcatagtaaaataaaagaaactaacagaaaaaagataatagcattattattaaagaaaaatgagatcaccaaattagatatatctagattattagatataagtataacaacagtttctacaaatatcacagaattgaaaagcgaaggtattgtagaagatgtaaggtctttggaatctacaggaggaagaaaagcaattgctattaagttgaatgaaaactgtagatattcaattggagtggcactaacaccgaatcatataaagatatcattagtaaatataaagaaaaaagttattgaaagtatgcgagttagacataataatgatggaatagagaacatagtaaatttacttaatgaaaatatagatttgttaatgaagaaatataatttatgttcagcaaatttattaggaatagggatttcattacctggaactgtagattttaaagaaggcataataaagtattcatatttgttaggagctaaagatttcaatttaaaggaaaagttcgaatacttagacattccagtatatgtagataatgaagcaaatttatctgcttactacgagtttttaaataaaagagatatactaagaaatctattatacgtatcaataacagaggggttaggcctcggtataataataaatggaaaaatttacagaggtgacaataactcatcaggtgaattaggtcatactaagatagcaattgacgggaaaaagtgtaagtgtggagctagaggctgcttagaagcatatgcgtctatgaattctctgattgatgattataacgaagctaatagttcaaatattagtgacattgatgaatttgaagaaagatataatcaaaatgataaagatgctcatgatgtactaaatggttatttaaaaacattatctttaggtctatcgaatttggttatgatatttgatcctagcagcatagtaataggtggagatataaataacttacttaatgataagatagatatgctaaaaaaagatgtttataaagataatttatttacaaatgaaaataattgcagtataagtattgcaagctttaaagaatcttatctactaggagctgctatgatgcctatagaagaattcttagaaattaaataatggagtggtgaaagctactctattatttaaaaaacttattaaataaattttaaaaatatatttttaaagttatgtaagcatagctatattaaggggagtcttaatctttgattggaactccagattaagacaagccttttatataaaactaaatatctatttatttcatattagatttatgtttttgattttgattggaactccgaattaagagcaaatttcttatgtgttactaaataaatatttacataaaggtaagtcttgaataagaaattaaaatttcttatttgagataaccttatatattaaatgattttcaattaaacaaagaggagatgttaataaaatgagatttttcttagacacagcaaatgtggaacacattaaagaagcaaatgaaatgggagtaatatgtggtgtaacaacaaatccatcattaatagcaaaagaaggaagagacttcaatgaagttattaaagaaataacagaaatagttgatggaccaataagtggagaagttgtaagtgaagatgctgaaggaatgataaaagaaggaagagaaattgcagcaattcataagaatatgatagtaaagattccaatgacagctgaaggattaaaggcaactaaagtattagcaagtgaaggaattaaaacaaatgtaacattaatattctcagcaacacaagcattacttgcagcaaatgcaggagcaacatatgtaagcccattccttggaagagtagatgacatctcaatgataggtatggatttagttagggatatagcagaaatatttgcagttcatggaatagaaacagaaataatagcagcaagtgtaagaaatccaattcatgtaatagaagcagcaaaagcaggtgcagatatatcaacagtaccttatagcttagtaatgcaaatgttaaaacacccattaacagatcaaggattagaaagattcaaagcagactgggcagcagcatttggaaaatagttcgtcgaaatgaagatcatgcatttgttcaggttattgatgatttagccgtgaatttctaacagcagaagttgcactatttatgcatgttcctaagacaagctaaggacaagcataaatagaacaacttctactgaagaaatgtctacagctaaatcatctgatataacgcttccacaaaagcatgaccatcatttctgatttagatatttttcaaagtatagtaataatataaagattaatatctatagtgggtatattttaaaattacaatagtaatttagagatataatagctagattctgagaattaggaaagtgtaaatgtttatggtaaatgttctgatgtaacgcttccacaaaagcattgccatcatttctgatttagatatttttcaaagtatagtaataatataaagagtaatatctatggaatacattttaaaaatacaagagtaatgttgagatatgatggctagattctgaaattaggaaggcataaatgtttatggataaatattttgatacaatgctttcgcaaaagtatgactataatttataatttattcatgttccaaatgacagagataaaaatatatattcttaagaatataagaatataagaatacaagaatataagaagttaagaataaaagaatataggaatataagaatttaacaatataagaatttataaatgaaaacataaaacaatttaaaaattaaccaatataaaaaggtaacaatataaaaaggtgtagtaaaataggcaccttttgaaaagtgaattaaggacagctaagattatttcaggtttgaaacgaattcgaagcgtagcatgggacttaattagcacaaccaagaacttataaaaaaatatgtctaggaaatgaggataaagatgagtagagaattagataaattatctattaatgcaataagagtattatcagcagatgctattgaaaaatcaaaatcaggacatccaggtttaccgcttggatcagctacaatggcttatacattatggacaaagatgaatcataatggaaagaaccctgaatgggataacagagatagatttgtattatcagcaggacatggttcaatgcttgaatattcattgctacatttatttggatatggacttacagttgaagatataaaaaactttagacaattcggaagtttaacaccaggacatccagagtatggccatacaaaaggtgttgaaataacaacaggaccacttggacaaggtatttgtaatgcagtaggttttgctatagcagaatcacatcttgcagaaaaattcaataaaccagattatagcgtagttgatcactatacatatgctatagttggagacggatgccttatggaaggcatctcaggagaagcgtcatctcttgctggaactttaggtcttggaaaattagttgtattatatgattcaaataatatttcaattgaaggaaatacagacatagcatttagagaagatgtagctaagagatacgaagcttatggatggcaagtactaaatgtagcagatggaaatgatatagatgcaatagaaaaagcaatagaagcagctaaagcggaaacaacaaaaccatctattataatagttaaaaatcaaattggttttggatgtccagcaaaacaaggaaaagcttcagcacatggtgaacctctaggtgcagaaaatgtaactgctatgaaggaaaacttaggatggaagacagagcctgcattctacgtaccagacgaagtgtacacaaatatgaatgaacacatagcaaaaggtgaaaagactgaagaagcttggaatgagttattcaaagcatatgcaaaagcttatccagaacttgcagcagaatatactaaatggatgagtggcgaacttgataaagaagctttattaaacaacgaagaactttggagctttgataaagaaatggctacaagagaatcttcaggaataatgataaatagattggctaaactaattccaaacttcattggaggatcagcagatttagctccatctaacaaaactcatatgaacgatagaggagatttctcagcagaagatagaagtggatcaaaccttcactttggagttagagaacatgctatggcagctatcgctaacggaatgtatgctcatggaggacttaaagtattctgtgcaacattctttgtattcagtgattatatgaagggtgctatgagattatcagctcttatgaatcttccagtagcttatgtattaacacatgatagtattggagtaggggaagacggaccaactcatgaaccaatagaacaattagcagctcttagaagtatgccaaacatgacagtgtttagaccagcagattcaaaagaaactgcagcagcttggtactacgctgtaactaatggaactactccaacatcactagtattaacaagacaaaagttaccactatatgatggatgtcctaagagagcattaaaaggtggatatatactaaaagattctaagaaagaaactccagatgtacttttaatggcatcaggttcagaagtagaattaatatacaaagcagcagctgaattagaaactaaaggaatagatgcaagagttatcagtatgccatcatttgaattatttgatgctcaagatgaggcttataaagaatcagttatgccaaataaagttcgtgcaagagttgcagtagaagcattaacaagctttggatggcacaaatatgtaggtcttgatggagatgttatatctttagatacttttggagcatcaggtaaagcagaaatcctattcgagaaatttggattcactgtagaaaatgttgttgaaaaggctattaatgtagcaaagaaatagatgttacagtaattaaatctacgattatagtagagaaaatttagtgattatagtaaaactttagaaaaatagatttagccttaaaatattaataaatatagcttaacagatataaaaaagatttagattaaaagtgtgtaaattaattaatctataaatatattaaaaccaatttattcattattataaaagttaaaattattaaaagatatgtataaagatgtgtgaaaaaaatagtgtgaaattatgtaactacaataataaattattggttagaaatatatttatagatttttaataaatgtatatttaagaaagggagattagtatgattattagaaatgttaatgataaagagtttaaaaagtatggacaagtactaaaaaactatgattgtacagaaataattgaaaaaatgaaaagtacaccactaccagaagatgtaatatatgaaccatcaattaaggaactcgaagaattagctatagctaaagaattacaagatagagaatatggagaattaccaatacaaataggatattgtaatggtaataactatatgttaaatgcagtagagtatcaccgttcgtctgagattaatatcgcggcaactgatcttatattacttataggaagtcaacaagatattgaagacgattactcatatgatacatctaaaattgaagctttcaaagttccagctggaactgcaattgaagtatatgcaactactcttcattatgcaccttgtaatgtaaatgaagaaggttttagatgcgttgtagttctaccaagggacacaaatttacctttagaaaacaaggttgataaaagtggagaagatgcattattatttgctagaaataaatggctaattggtcataaggatacagatttaggtgatcaaggagcatttatagggttagttggagaaaatatctcaataaaatagattataaatagaaattaaaatccataattttgttttgaatctaagcagacatatggactctatgatttaaatatgtttgcttattatatataaatcagcaaagaaatatagctgatatattacttgataataataaatttaaataaactataagaagacttaaacttaaataagcataaaaattattaaataaactataagaataagctataagaaaaactataagaaaaactataagaaataagaaagacattataaattatatgaaatgaaaagatcagagtaaaatggaggaattagacaatgaataatataccacaagtaaaattaggaattgttgcagtaagcagagattgtttcccaatggaattatcagcaaatagaagaaaagcagtagtagaagcttttaatggagaaatttttgaatgtcaaacaactgttgaaaatgaaaaggatatgagaaaagctttagctgaagttaaagaagctggagtaaacgcattagttgtatatttaggaaactttggtcctgaaacttcagaaactttacttgctaaagaatttgatggaccagttatgtttgcagctgcttcagaagaaagcggagataatttaataggcggacgtggagatgcatattgcggaatgttaaatgctagctacaatttagctctaagaaacattaaagcatacattccagaatatccagtaggaacagcaccagaagttgcaggaatgatttctgaatttgtaccagttgctactgcactacttggattaaagaacttaaagataatttcttttggtccaagacctcaagatttcttagcttgtaatgcaccaattaagcaattatacaatttaggtgttgaaatagaagaaaattcagaattagatttatttgctgcatttaatgttcataaagatgatccaagaattccagacgttatagctagcatggaaaaagaattaggtgaaggaaataaaatgcctggtatcttaccaaagcttgctcaatatgaaattacattattagactggatggaagaacataaaggttcaagagaatacattgtatttgcaaataaatgctggccttcattccaaacacaatttggatttgtaccatgttatgtaaacagccgtctaacagctatgggaatcccagtatcatgtgaagttgatatttatggtgcgttaagtgaatacattggaacttgcataagccaagatgttgtaacattacttgatataaacaatacagttccagctgatatgtacgaatcagaaattaaaggtaaatttaactattcattaaatgatacatttatggcattccactgtggtaatacagcagcttgtaaattaacatgtggaacaatgaaaaaccaaatgattatggcaagagcccttgaaccaaatcaagaaccaaatataactagaggaacacttgaaggagatatagtaccaggagatattacattcttcagattacaaagtaatgcagatgcagaacttacagcttatgtagcagaaggcgaagtattaccagttgcaactcgttcatttggagctataggagtatttgcaattcctgaaatgggaagattctatcgtcacgtattagtagaaggcagatatcctcatcatggagcagttgcatttggacacttcggaaaagcagtttacaacttatttagatatttaggtgttaaagaagttggattcaatcaaccaaaaggtatgctttacaaaactgaaaatccatttgcatagtttaaactttactatacttaagatctgaacatatgcatatagctcgccgaaataaggattatgctgttgttccagtttctaaggaaattatgatggatgattctaagatcacaagttgtacccaagatgctagcctcaaaggcgagctttgaactagcatacttggaacaacttttaatctaagaatcagagccatcaaattcctaatgaaacatttcacaaaagcataattcttatttctagtcaggatatatttcatagcgtaaatctatccaatttaagaattcgacttattagatgaatatatttacaaagttactaaaaccttaagttcatatagtcactagaaatcataaatatatttatggagaaaacatttgaaaatgagctgttaaaggttcttaagcagagaacccaaatctgcgatttggtgagaatcgcttactcagcgaacaaacgtgagtcgagtttccgctaacgattgttccactttagcttgtgaagtgaaagtccaaaattttattttgggttcttgaacttcctcagcgaatgcaatgagtcgagcttctctaggaaagttggagcatgctaaagtggatgcaatctgctgctttgagccttcagcgatattttcatagattttcggaatcaaaatatttatgatttcggtgaggtatacgcataagtatagatatctatagagataagttcttagcatgtaattaattctgtttatataaagatataggctgaaagcataatatttatagctttcagcctttgttttatgtattttttagaaagtacataagggggagactctagatttgtttgttattaattgttaaattcttaatatatgaataagttttgtgttagatataaaaaaatatgaataaaatattgacaaatggtagtgttaaagatataattagacatagataaagcaatggagcatttattttatataggtgttttattgcttttttttatttattattgctgatatatcagtgggatttcaatgaatttcagtgaaaggagagataaatctgtgtcaagctgaaaagtcgtatgctaaagaaatatataagcaaattaagttagatattttgaaccaaagaataaaggatggcgattttcttacattatcagaactagctgataagtacaatgtgagtaaaacacctgtaagagatgcgctaggagcgttagagattcaaggatatcttaaatctttacctagaaaaggttatttagtaaaacctataacacagaaaaatataagagaatcttttcaaatgagatttatttttgaaaaagtagctgtaagtttagcagttaaactagctagtgatttggaattgcaaaatataatgcaattagctgcgaaatttccagaagtctcgcaggaaaatgagattacacggtttaatgagttaaatgatatgtttcatatgtcgattataaaggcaactcacaattctcttctaattgaaatgtgtgaaggggttatggaaaatttatcacggatactaatgacagacagcaaacatttagagtttgtgaatgaaaaagaagaacatataaatatagcaagagcgctgattcagagagatagtaaaatggcagaaaaacttataacggagcatcttctacatttagaatcaagagtaaatactaatgaaagcattatagtataagaagtaaagtttagggtaagcttttatttagaagaagagttttgcttttgaatgtaaaggtatgataagaacttctatatttaaaagaatgtgtaaaaattttaacttattataaaaataagaattattaataaatactttttaaattaattaagggggaaaaaaaatgaacaaaaaatcgttagtaggaattgtactagcatcagttatgacagtaggtataatggcaggttgtggggcatcaaaaaatgattcagcaaaaagtggtgatggaaacaagaaatatgtaattgcatgtgatgctaaatatgcaccattctcttttgaggaagatggaaaatataaagggatagatgtagaacttttagatgcaattgcaaaggaagagaaatttgaatatgatttaaagccaatggactttaacggaataattccaggacttacatctaatcaattagatggtgctattgcaggtatgagtattacagatgaaagaaaacaatctttagatttctcagatggatattttgtttcagggctatcattagttgttaataaagataacactgatataaaaggtgcagatgatataaaaggtaaaaatgcatcacttaaaaaaggtacagcaggagcaaaatttgctgaagataatgaaaaaaaatatggattaaatctaagctattttgatgattctccatcaatgttccaagctgttgaaaataagaattgtgatttcttattagaagactatcctgttattgcatataaaattaaggtagatcctgattcaaaattaaaaattgcaggagataagctaacaaatgttgactatggattcgcagttaaaaaaggtgagaatgcagacttattaaagaaattcaatgaaggtttgaaaaaattaaaagaaaatgggcaatatgataagatcgttgatcaatatattgctaaataaatagtagataaaatatgaactactaatgattaaaataagctatgagtttattttaaaataaaaagctatgaacttaggaaacgatgtttctaatttatagctttttcctattaaaattgaatttgaaactgaaataaaaacttaattcataaaataagtattaaatatcaaaaatgaaggagaatgtatcacttgattcataattagaaaaacatagcttttgtaaaatctttgttttcaaacagtaaatattgcctataaatccgcatatatattaggtataactattttgttatatgtcttgttatatttatacatatacttaatgcattgacagtttttgaattaaactatataataagtttcataatgaagtaaaaaatcatttgaaatttattgtgtggaatagtttttccatagtgcaataaattggattttttaattaaaattaaataaatattgcaaaggggcaaggaaaaatgaacaaaagatcattattaagtattttattagcatcagtaatgtctatagggctaatgactggatgtggtgcatcaaagagtgatacaggatcaggtgaaggaaataaaaaatatgtgattgcatgtgatgcaaaatttgcaccattctctttcgaagacagtggaaaatataaaggaatagatgtagaacttttagatgcaatctcaaaagaagaaaattttgaatatgaattaaaaccaatggattttaatggaataattccagggcttacagctaatcaattggatggagctatagcagctattactataactgatgaaagaaaacaaacattagatttttcagatgggtattttgtatcagggttatcaatagttacgaataatgataacacttcaattaatggagtcaacgatctaaatggaaaaagtgtttcaataaaaaaaggaactgcaggagcaaaatttgctgaagataacgaatcaaaatatggattgaatttaagttattttgaagattctccatcaatgttccaagccgttgaaaatgggaatactgatttcttaatggaagattatccagttattgcgtacaaaatcaaagtggataatggagcaaagttaaaaattgttggagataaattagatgctgtaaattatggatttgcagttaaaaaaggtgaaaatcaagatttattaaagaaatttaatgaaggattaaagaaattaaaagatagtggaaagtatgaccaaatcgttggtcaatatataggaaaatagtaaggagaattaaaaatggagatttttcaattactaaaagatagtctgcctagtttattaagtgggctttcagtaacaattgaagttgcagtaatatcattaatattagcagttatattcgggataattttaggaatatttagcataagtacttcaaaaattttaaaaggtatatctacaatatatatctacattgtccgtggaacaccacttatggttcaagctttattcttatattttggtgttggacaggcatttggtataagatttgaccctatagttgcaggtgtaataactcttacagtaaatgcaacagcttatatggctgagatatttagaggaggaatacaagctgtagataatggtcaaatggaagctgcaagaagtttgggacttaattactcaaaggctatgagaaaggtaattttacctcaagctgttaagattatgattccatctatattaaatcaatttattgttacattgaaggatacatcaatattgacagttattagtataagagaacttacatcgtcaggacaaattattattgcgagaaactttaaggcacttcagatgtatgcaattgtagcttgtatgtattttatagtaataacagtattgactttaatatcaagttatatagaaaggaaaatcagctatggtaataagcgctaagaatcttaaaaaacgttatggacaattagaagttcttaaagatatatcagtaaatgttacagaaggtgaagttctttgcattataggcccttcaggatcaggaaagagtactttcttaagatgtcttaatggtttagaagaaattcaagcaggtagtattacaatactaggccaagagcttgtaaataataaggacataaataaattaagagaagaaatcggaatggtgtttcaatcttttaatttattcccacacctaacagttcttcaaaatatgttattagcacctttagaattgaagaagatgaacaaagcagaagcaactgaaaaagctctttcattattggacaaagttggattaaaagataaaaaggatgtttatcctgatactttatctggtggacaaaaacaaagggttgcaattgccagagctcttgaaatgaatcctaagataatgttatttgatgaaccaacttctgcactagatcctgaaatggttggtgaagtgcttaaggttatgaaagatttagctcaagaaggaatgacaatggttgtagtaactcatgaaatgaattttgctagagatgtatctgatagagttatatttatggatcaaggatatatagttgaagaaggtcctccagaagaaatattcactgcacctactagcgatagatgtaaagagttcttagataaagtaattaacaattaaaatttattatatgagaaataaagagcattgtttcaatttcaatatttaatgatattgagaaacaatgttctttttatatatttttcatggttttttacttgatttatttattaatatgctataatttatatttattaggtattataagtagaataataaatctatacactaactcgttaaaatatataaagaaatacatatattttcgatttattgttttagaaaatatggcacatagaaattggggaggataaaaatgatacaaattaatccgaaaaattctgaattaaaaaatataataattctagctactggaggaactatagctggtacgggagaagaggggaagactactaattatacagcaggtaacatagatatagaagtactagttagtagtgtcagaaaccttgataaaatagctaatatatatggtgagcagattgctaatgttgatagtaatgatataactatgaatcattggttaactcttgctaatagaataaatgaactttcaaagcaagacgatgtggatggttttgtaataacacatggtactgatacattagaagagacagcatactttttagatttaacagttaaaacagataaaccagtcgtattgacaggagcaatgagaccgtcaacagcaacaagtgcagatggacctttaaatttatatcagtcagtagcattagctgctagcgatttatcaagagggcatggagcgatggttgttttttcagatggaatttatagtggaagaaatgttcaaaaaatcaacacttttaaaacaaatgcttttaactcaattgaatttggatgtcttggttacatgagagacaatataccattcttttttaataagtcaataaaaccacatacaatttattcacaattcgatgttacaggcttaactgagctgcctaaggtttctatcgcatatttccatattgacgctgatccttcaattattaattattttgctcaaaactctgaaggaattgtaatagcgggtgcgggaagtggtactttcagctcaaattggttggaagaaatcaggaatcttgaaacaaagggtattccagttgttagatcttcaagaataggaaatggaataatattaacagattcaactatagataaatactcaaattgcattcctagttatacattatcacctccaaaatctaggatattgcttacactagctcttactaagactaaagactattctgaaataaagagaatatttgcagagtattaattcaaatattataaaaaatacaattacatgtagtttggcataaaatgtttcatagatctcatacgaattgaaaaagttatatttaaggtaaagatagtttataaaaatgctatctttaccttttatttatagataagccaactataatctatacttatgcgtatacctcagcgaaatgaataatatacttttgttccagtttctaggttattttgatgggtaattctaaggctataaagttgcgcccaaagtgctaccctcagagaacaagcgctcacagagaaagtttgaagaacgaaatataaaatgctcatagagaaagttctgcttaccaaatgtaaaatttggagcatcacttttcgattctcactttttgagctagcacatttggaatagttgaaaggaaactcgactcacttcgttcactgagcattcctgtaatgaacttaaatagaaattgataaaaaaatagcctactgttagaatcaaaatatgagctcaatcatatttaaataactatcaaggaggctatcttaatgcaaacaaataatatcattaagcactatactaagtcaactttaattataggaattgatgttgctaaatacaactccgtcgcgagagcatttaattctgaaggtaaagaacttagtaaagctattacttttactactgactatgaagggttaaatttatttcatatgtggataaataaaattaaatctacttataaattaaaagattcaatcattggaatggaacctacaggacattattggataagaattgaagactatattgtagataagatatcaaattccatggcagttttagttgaagcatctgatgttaaatctatgagagatttgctaggaatggagaataaaaaaactgatcatattgatgctatggccattgcaaaaacaattttatttggtaaatattcaactataaacaaaagaaatagtggatttactgatctgaaagaactaataagatttagagaagaaaaaatcaaagaaaaagttaggcttgataataaaattcaaagatggcttgatattaactttccagaatacaagctattgtttaaaaaatggaatacaaaaacatcaatagctattcttaagaattttccaacacagagagaaattttaaatactaattctaaaaaaatagtaagtactataaaagaagaagtaaaaacaggaaatatatcaaaatatgtggagcttttaaaagagatagctgaaaaatctatagctctcgataaatgttctgaaatgcagaagattatactaaaacattatctggaaaattatttaaatataaatcaaatgttagttcttatagaaaatgaagttaatgaattactgaaaaaaatagattatgctcaaaatcttgttgaaattaaaggtgttagttcaatgtttataggttcgcttttagcggaaaccggagatttgaaaaatttcaaagttccacaacaattattagcttatgcaggcttagatcttaaaataagtgaatcaggagaaaagaaaggtaaaacaacaatatctaaacgtggaaattcgagggttcgtgcaatactatttaagtatttactacctttcattaatgctaatgaagaatttaaggcactacataagcattatacgacacgaagtaataatcaactaaaagggatgcaatctttaatagcagtaggctgtaaactcttaagagttttctttggaatgtcaaaaacaaatacaaattatgaacctactataatattggaacacaatcagtttttatctatagcagcataattattctaaacaatcttatttataaaaaaataatagctaggttaaggtgatgcaacacttactttatggcataagaccagggcactgagcattaatcaccatccaactacaagtaagaggtacaaaggaatttaggacttagatccagttagacatgggaggattgactactgtagtatatggattcctataagcattcatattaaaaatagccaattcccattggtttattagttatactctttttttaggtaatgttggggtatttacactaaaatataatcctagctaatactttttttgaaatactaagatatattaagaaaacaggagcataattaagtttatatagggagtaatttcaattgaccaaatcatagatttggaatttcaattaagaattacatccatcataattaccaatgaaacattccacaaaagtatatcactcatttctggttggaatagattgcatagtttaggtatagtttatgattgtgttatctatagatgaataaccatacgcgtaaagcttaaccagtaatcaccaaattgtagggggaagagagtagctcattaattttccctctgtagtttggcgttttcttttttctcgcttacagctccttcctaaacttactagtatctcatatattatttccaagttttcctttttaggaatgaaattaaggcatatttctttaagtttacttcctatagttgaatatatcatgagcatacttatttctctattttcttctgttttatacttaaaatacaattcagaataaactgtatttattagtaaagttattatcaatctaccataaagcaaacaatttaagtaatcaattcctgctgatttgacatggtcaatctttccgtagcttttccagcatttaaataagagttctatttgccatcttaacctataaatatcaaggagcatgtccacatcggcttgttctttttcaatgtttgttatcataataacccagctcattagttccttgtcaattttctttggggatcttccttgagcttttgctttttctctagcccttcggattcgcaaattcacaatttcttctggtaatctttctcctattactctaaattcttctctattattttgtttcattccaacatataaataagtatctataacaccgctcgatttctttaagaaatcaatcatttcaactttttcaaaattcccttttttataattttctttataaagtgcagtattatatttaattttactaagaaaaaaagcagatttcttttcaagcattttaaaacactttttatcgaaatatcctaaatcaactaatagaagttcattagtgttaattttgtccgccaaagttttcatatatgaattatcatttgttgtgccatcctcaaattcaaatgtttcaatctgcttacttttgaaactatatactgtttgtattttcatttcagatgccgacttatcttctgaaaaacctttataagaatctcttaacgagtcatttagcttgattaagctactatcgcagatttttatatcattaaaggctttaaatatttcaatgtgattgtgtttaatgctcttaattattttatcctcaataatatttgtaagaatagtttttaaaaagtttgaacctgccttgagcttattttctatagcttgcctagacactttcaaattagggtttatatcttcacaaaaatttgctatatttcttaatgatggattttcaagactataaactccaaaagtaaatgctttaaaaaatgtaaatccatccaatttactatttctttgtgtaaatccagtagtcacggcggtttttgttattaatctttttgaaaaaagattaataattttcttgattttatccatactacttaatgaatttaaattaattttcattaaaagtcattcctttcttttttgtgtttattgttaggaatgactttttttattatttttataactgttaatatatgatttaactgttaaaatactcattagctttacgcgtatggatgaataacttaagaatttggcttatactttgcaataaatgccatactagaaagtagaaacatttttatgcagcaggcattgaaaatgagctgttaaaagctcttaattttaggttgttcaactaatgcttgtcacaatgaaattgggagcaagcattagtggtgcaacctgcaatttagcactttcagcgaaattttcatagtcctgtgaaataataatgtttttactttcggtggattatttataagtctaggttatatattgtttatctataataagaactttaattaaatatttaatttggatattaagagatattttagtcattaaataaaagttcgtattcatataataaatgaaatcaatataatattatagggctttttatatgaaagaacaatgcacagaaagcaatgatttttttaagagaatatataaaactggtaaattaattgaatttgatgaaaaatctaaaatagtgtttataagtgatgttcataggggcgacggtgggtatgctgactctttaagacaaaacagaaacatttataaagctgctcttggattttattatgaaaatggatatactttaatagaattaggtgatggagatgaattatggaaaaataaagattgtttagatatcgcctataattataaagatgttttttcaatgcttaatgacttttatgatgataataggttgtgtttggtatacggaaatcatgatatagtaaaagctaacccagaattcataaaacggcaagaaagactttttgcaaatgccggaaatggctttggacgtgagatgataaacttatattctaatataactttttatgaaggagttatacttagatatatgccatcaaaagaggatataattgcatttcatgggcatcaagtagattttattaattgtgagatgtggaaaactagcaggtttctagtaaggcacgtatggagatttatggagggggttgcaggatttaaacctccaactagtccggcaagtaattatgataaaggaacaaaaatagatcatatacttggacatttagctcgtaaggaaaaaaaagttataatctgcgggcatactcacaacgatatatttcctgaagcagatgaggggatttatttcaatgatggctgctgtgtgtttccatcagcagtaacttgtattgaattaacgggtggtaaaatatcattaattaagtgggcaatagaagttgatagtaaagatgttttatacattaataaaactataattggaggtcctgaaaatttagaaaagtacttttattatgcaaaacagttttagagtagaagaacgtttaaaaaggagattatatatgaagtttattgatttacattgtgatactgcaagtagaattttttatgaaaagttaaatcttaatcataagaagtgtaaagttaatattgaaaatttaaaaagaggagaaaatttagggcaggtttttgcatttttcatagagaaagaatcaattgaagatccatatgatgaatttataaaattatataatagctttactcaagaaataagtaaaaataaaagagagatagaaattgtaagaaatacagctgagctaaaaaatgctgaaaaatcaggtaagattggagcttttttatcaatagaagaaggagaagtcattaaaggagatatacaaaagctaagaactgtatatgatatgggaattagaatcataacaatcacttggaattatcaaaactcattaggatatcctaacgcaggttatacttatagaaataaaggattaactagaaaaggagtcgaagttattgaagaatgtgaagccttaggcataattcctgatgtatctcatttatcagatgctggattttatgatttgattagaatttgcaaaaaaccatttatagcttcacattctaatgcacgtgcgatcacagagcatcctagaaatttagatgataatatgataaaattattagctgaaaagggtggagtaatgggtataaacttttgttctgattttttaggaaatgaaagtgtatcttcaatagaagaaatgatttgtcatataaaacatattaggaacattggaggaattgatgtacttgcccttggaagcgattttgatggaatacacaatgaggtggaaatagaaaatgcttcagaatttaataaattatatttagtacttaaacaaaatgattttaaagaagcagagatagaaaaaatattttataaaaatgtcctaagggtttttgaagaaaactttaaataataaaaattcatatatattgcaattcacaattacggctaaaattcttgaaatatatattgtaaaaattttaaattataagatattatcttaaattatcaggcaagacaaacaaaataattttacagaaaataaattgttttgttaataacttatatagtagaatacaatgaaaatttaaaaggtggtgaatttgtcagatattcagttatataatatctgactaaggtttgttatgaataaattaaggggtaaagttgcactaattacaggtgcatcaagaggcataggaagagctatagcagtagagcttgcaaaggaaggggcaagcgttataataaattactctactgatgacgaaggtgcaaaggaaactttggaagagataaagagtataaacggctatggagttatagtaaaaggagatatatcagctttcgataaatgccaaattatagttgaagaagttttaaaagtaatgggaaagattgatattctagtaaacaatgcaggcataagtcatataggtttatttatggattcaacagaagaagaaataagcaggatattgaatacaaatcttttaggagcaatttatttaacaaagcatgtcctaaataatatgatttctagaaaaagtggaactgtcataaatatttcttctatgtggggagaagttggagcttcttgtgaagtgttgtattcagctaccaaaggcggattgaattcatttacaaaagcacttgcaaaagaagtagcgccttctaatgtaagagtaaattgtatagctccaggagtaatagatacaaaaatgaactcatttttagaaggagatgaaaaaaaatccctagaggaagaaattcctctaggaagatttgggcttccaagtgagattggtaaaattgctgtatttttatctagtgaagattcatcgtatataacagggcaaataataagagcagatggtggatatatttaaggtatatccgcttactcttcttcaccttcaggtgatactattttctccaagtaaaaataaaattctacaccattattgatgttttgtaaattaaactcactgttatgaagacgtagtatatttttaactattgataagccaatgccagtactgttcttttgagttctttctctggatttatctattctatagaatttgtcaaaaagttttcttatttcagcttcaggaataactactcccatattttgaacagatattttaaacttgtctagaccttcttcaatatttacatttatgtcattgccaggaggagtatatttaattgcatttgttataagattagttaaaacctgctccatttgaaatggatctgcataaacatagctataaggtattgatgaattaaagtttacattaaacttattttcttcaaagtctggtttatgtttatttaatattttattaattaatctattaatattaaaagattcaaaatttggttttataatcccggattcaagtttcgaaagttctagcatattagtgactaatacagtcatcttttttgactcgtcaattatagtttctaaatataaattggcgtcctctccagatacaatgccatctttaatgccttctgcatatccctctataattcctattggagtttttagttcatgactaacgttagatatgaaatcttttctcatatcgtctaattgcctttctttttcaatatcatcttttaatttcttgtttttttcctgtaaatctactagagcagcttgcaggtttttagataaaaaatttagtgacttggcaagacttcctatttcatcatctctatcagtttcataaacctttgcagagaaatccatatgagatattttatttgctgtattggttaagtttacaagaggcttagatataaggttagagtaaatggaagaaagtattattgatataataatcaatccaaaaaacaaatatacaaaaaattcactcataacttcagaggcttcctttattggctgaatggaagcaacgcaaaaaataagactatcatttttgtttgttatagacatagggctaattacaccaattttacttaagccgctactctcattagtaaaagttctatatttagtttgagaatgagtaataacgtcgttaatcagatccctatcatttattaattccttaccaaaagatgttaaggtgtcaaaactctcctgatcactataaatattgttagagaaatactttatatccccatttgttgatgtaatgataattttagcattattatcattctcaaatttttgcaaggccttatataagtcagcatcattgtctatatgaagtgaatataaatcatgaaacttattaacttctttaactaacgaaattgtttttttgtaagaataaaaactttcaaagaaaaaggcttgtgcaaagtaagttatgaacattaatgcaagaacaagccctaatgttatgctaaatagccttttagataaactacgcctcatttatttaacctcaaatttatagccgctgccacgaactgtaattatataattagatttatctaacagcttttcacgaagtcttttaacgttagtgtcaactgtacgtatatctccatagtagtcaatcccccaaacattatccaatatattatctctacttaaagcaatcccttcattagtaactaagtacatcaaaagttcgtactcttttggtgacaatattatttcttttccatcaatttttacttcatgcgaaagtttgtttatagttaaaccgttaaaatcttgaaagctcgaatctagatcttctctagttctttttagaagcgccttaactttagcaattaaaactttagggctaaagggttttgtgatataatcatcagctccgtaatcataaccttgaagtttatcctcttcttcaccttttgcagtgagtaaaactacaggaacggtggagacttctctcaatttttccaacatagttaatccatccataacaggcatcataatatctaaaagtactaaatcaattttttgtgtactaaatacaaataatccttcttcgccatttgaggcttcaaaaacattaaaatcttcttttattaaataatctctaagtaaaaatctaattcttagttcatcttcaacaattaaaatagactttctcataacatttcatctccttatatgtgaacgtgtaaattcatataatgcttataataacataataccttacaaataaggcaattctattacaattatatatcacattgtacaattttttgtgttctaagcgcaatataatattgcaaaaataatcctttatcataattctaaaaatattacaagaattttgggcgtaattgtgaattgttaaatgtgcactgtgaattgcaatatacatattgtattaagtttagcatataaagatcaatatgtatgttataatagtaaatctacatttaagattgcaataaaacaagatctaagcaggactaaaatctgcaagctcaattacaatgcatatattaaattcattatagtataataacgtaaatactctcatatattatattggataataattatctataaataatgaatttataatgattatcatgaatttggaagaaataaaaaagatttttaagaatatatgtcagacatctcgcatggataataatactaattttgaattggaacatatatttgtgttattatataggtgtatagattatttttgattatagaaatttacttttgttttgtgatatgattatgaatggcatatttatactttaaaacgtgattagcattactagtgttattttaaatgaaaagatcgcaaagtatcaggatatttgatatgtaattaggagaatagtgaatgataaaattaaattttgatgtgaagagacatacacttgaaaatggcttggaagtaataactattaagaaggatactcaaattgcatctattaatataggagttaaggtcggtgctctatatgagaatatgaaagaaaagggtataagtcactttattgaacatactttgtttaaaggaaccatcaatagaactggtgaagaattaaatgatgaattagaggctttaggcggagaatataatgcttatacagattatgatgttactgtttatacgattagctgcttgattgaagagtttaaaaaagcaacagagcttttggctgatatgattgtaaatccaacatttgataaaaatgaaatagaaaaagaacgaggtgtaattttatcagaaataaggatgagcaaagatgatatagaggattttagttttaaaaatgtaaataaacttgcatttaataaaagtgctttgaaatatgaagttactggacttgaagagaatgtttctggattcaccagaaagaaattgatgtctttttataaaaggtactatacaccaaaaaattctcttataactatggtatcgcctttagagcatgatgaagctataaacttagtgaaaaactatttcagtcaatgggaagggcaaaagcctgaacctataaatatcgtaatagaaaaaaataaagaaataacaggaataagttataagaaggatatagagcaaagcactatagtttatttatataccttcaatgatttagaaaaatcaaatgaacttccactaagaattttgaatcatagacttggggaaagttcgaattcacttctttttagagaaattagagagaataggggattagcttacgatatttatactcatttagaaataaccaataatataaaaactctctatatatacacagcagttagtgaggaaaacattgatgaagctaaagcggccattgaggaaacaataaaaagtgtagttgatggaaagattcaaataggagatagagatctaaatataatgaaaaaagtccataagacagctgtaatatcaacattggaggattcatctgagttatgcaattacatgcttcatcaagcactagagggtgaggatatatttgaatttgttaaagatatggatagattaaatatgttggatatattaaaaattaatgaagttggaaaaaaggttttaaaaagcccaactatacacatattaaagtctaactagtaaattaaataataaaaaaggtgaaagttttaactatggcaaaaataacgaaaatagaaattcaaaagagaaacaaagaaagagttaacttatttttagatggtgagtatgcattttctatttcagcagaactagtatataaagaaagtcttaaagtaaatagtgaaataaatcctgagaaattgaggacactagcagaaagtgaaaactttatgaggtgtaaggaatcagctttgaggataatagaaaaaacatataaaaccgaaaaagaggttagagataagctaaggcttaaagagtatgacgaatcatctattgacaaagctattgaatttcttaaagaatataattttataaatgatggcaattatacacaaatttttataagagataaattacgctcaatgggaagtcagaaaataaaatatacgttgcttcgcaaaggaatttgcaaagaaatcattgatgaggaattattaaatctagataaagaaaatgaaaaagatgttgcatttgatatagcacaaaaaaaatataatttaataaagaataaagagactgatacttataagatttcaggaaaattatataggtatttaatttcaaagggatataatacagagattactagtcaggtaatcaaaaaagttatggctgtagatgtggatgattattaatagtgtttttatatttcaccagttgaaattcaaagcgcatattagatgtatttttaatatgcttatgttctcatttttgatataattagaatatacattataatagggtgaaaatattatttgtggaggaaaaattatgaatgaaaataaagctatgttagtagttaatggaatcatctcaggatgcattcaagtaagtatcataattgcactattagtctttcctagtataatatttaattccacgtcagttcattcattcacagaaaatgttcttaaacaagaatattcaccaaatgaaaatagcaagattgtaaatagtaaattatttaagaacatacagtcaattaaaaatgcatcatcaaaagaaattattatttataatggagttactatagaagacggaattaaatcaaatgaagaaattgataataaagcgctaaaattaactcagggcgctaaaactgatagggaaagagcaaaaatattatatagttggattggaagtaacataaaatacgataatgaaaaagcgcaagaagttttaagtggaggcgacactgaaaaaatgccagaaagcggtgcaataccagcattcagcagtaaaacaggtatttgttttgataaggcatgtctttatgtagcgatgtctagagccgctaatcttaaagttaggcttttaggaggccaagcctatgatggagaacaatatgttggccatgcatggaaccaagtttatttagaggatgaaaataaatggatcaatgtagatacaaccttctatgatggaggaaattattttgattccaatttatttaataagcataatgtagaagaaattgctggtgaatggtaaattagtttgcttttttaaattttgaaataataagatctatggccttttcgcaatctttgtcattaggatctattgaccatgctaaattaaagaaacgtaaagctgtattaaagctttctttcatgacatagcaatatccaagattaaaaaagtacttactttcatgcttaagagaaattgctttgttaagcataattattgcatcatcaaattttttgagtttaattaaacaaactccacaattatagtatgaacaagccgtgtttaaattttctgatgcagactttttataaaaatccatggctttttcgtaatccttcatattgtaaaatttgtttccttcagtaaaataattcatttatgacctccaatggcaaaattgtaaatattaacttaaattctttataattatagacaatactttatattagtatacatatggaagtatttattaaggcataattaaaaaaataacagaccagtatgcacggggaattattttctttcatgtgcctaagctttaaaattatataaccaatatgtacattgaaaaaacagagtaggtgaaataaatatgataaattataaaattggtttagatataggatcaacaacagtaaaattagtggttcttaataatgagaacattttaatatatagtaaatataaaaggcatttttcagatataagaagtacaataattgatttaataaaggaatgctatgatgaattagggaatattaattgcaaaattaatataacaggttcaggaggattgtcagtatcaaaatggcttaatcttggttttgtacaggaagtaattgcatgttcaaaaacagttgaaacaattattcctgagactgacgttgtgatagaactaggcggggaagatgcaaaaattacatattttagaggtggaatagagcaacgaatgaatggaagttgtgccggcggtactggagctttcattgatcaaatggccatattattgaatactgatgcaatggggttaaacgagtatgctaaagaatataaagtaatatatcctatagcatcaagatgtggtgtttttgcgaaaacagatgttcagccattgataaatgaaggcgctaaaaaaagcgatatagctgcatcaatatttcaagctgtagttaaccaaactataggaggacttgcatgtggtaagcctataagaggcaatgtggcatttttaggaggtcctttatttttcctttcagaattaaggaacagatttattgaaacattgaatttaaaggatgaacaaattattgcgccagaaaattctcaactttttgttgcgatgggagcagctctattgtcaacaaaggaaaaatcaacatctttaaaaaatatagtagataaaatttctgatatttctaatataaaagatgatactgaaccaagacttgaacctttatttaaagataaagaagattacaacaagtttaaagagagacatgataagaatgttgtaaaaaagggagagttaagggaatataaaggacaagcgtttttaggaatagacgctggttcaacaactactaaagtagcacttataggtgaaaattctgaacttttatattcttactatggaagcaatgaaggaaacccactaaacaaagttgtagaaatcatgaaagatttatatgaaaagcttccagaaacaatagagattgtaaactcttctgttacaggttatggagaagctcttattaaagcagcacttcatatagatataggagaaattgaaacaattgcacattataaggctgcagatcatttcttgccaggtgtagattttatcttggacataggtggacaggatatgaagtgcataaagataaaaaatgatgcgattgatggaatacttttaaatgaagcttgttcatcaggatgcggatcttttattgagagttttgctaagtctcttgatatgaaggtagaggatttcgcaaaagaagccttaaaatctaaagctccggtggatttaggttctaggtgtacagtatttatgaactctagagttaaacagtctcaaaaagaaggcgctgaaatttcagatatatcagctggtctgtcatactcggttataaagaatgctttgtttaaggtaataaagttaagagatgaaaaagacataggtgaaaaagttatagtgcaaggtggaacattctataatgaagctgtacttaggagttttgaacttatatcaggaagagaagcagtaagaccagatatctcagggctaatgggagcctttgggtgtgctcttattgcaaaggaaagatatattgaaggagaaaagtcaacattattacctagagatggaatagatcaatttgaaatgacagcatcatttagaagatgcggaaagtgtgggaataattgtttgcttactgtaaataaattctctacagatgaggagttcatttcaggaaataggtgcgaaagaggacttggaatagaaaagtctaaggaaagcaaactaccaaatttattcgattataagtacaagagaacatttggttataagcctttaaaagaagaagaagctaaacgtggagttataggaattccaagagttcttaacatgtacgaaaattatccattttggtttacacttttaactaacttaggctttagcgttaaattatcagcaccttcaagcaagaagatatatgaacttggaattgaaacaattccatcagaatcagcttgttatccagcaaaattggctcatggtcatataatgaatttgataaatagaggaattaaaaatatattttatccttgtatatcatatgagaaaaaagagttcatggatgctcaaaatcattacaattgtcctatggtaacttcttatccagaagcgataaaaaataatatggatgaattaaaggaaaataacattaatttcatggaaccatttttatctttagataatgaaaaggagcttgcaaaaagaattgtagatgaattcaaggcatttaatgtaagtatacaagaggctaaaacagctgtggaagaagcaagtaaagaaagagagaatttcaaaaaggatattcaaaaaaaaggtgaggaagttatttcatatctacgacagaataataaaaaaggaatagtattaagtggaagaccttaccatgtagatcctgaaataaatcatggaattcctgatatgataaattcttttgatatggctgtattaacagaagatagcgtgtctcatttaggcgtattaaaagataagcttagagttgtagatcagtggatgtatcactcaagattatacagagcggcttcttttgttgctgatgagccttgtgtagatatgattcagctaaattcttttggttgtggattagatgcagttactacagatcaagtttctgaaattatatcttcaaaaggaaagatatatacagttttaaaaatagatgagggaaataatttaggagctgctaagattagaattagatcattaaaagctgcaatgggcgaaagagaacgaaaaaattataaaccagttgaagaacaagtagtatacaaaaatccagtattcacaccagagatgagaaaaaaacatacaattttatgccctcaaatgtctcctattcattttgattttattgagacagcagtgaatgcatcaggctataatttagaggttttaccatcaatggacatgaaagctgttgatgaaggattaaaatatgttaataatgatgcttgttatccatcaattatagtaatcggtcaaataattgaagctttaaaatctggaaaatatgatttgaataatacttcagttataatatctcaaactggcggtggttgtagagcaacaaattatattggatttttaaagatggctttaaagcatgctggatttgaacaagtacctgttatatcattaaatgcagtaggtcttgaaaaacaaccaggttttaagattactccaaaattgcttcataaagctattatggcattagtatacggagacttattcatgagagtattgtataagacaaggccttatgaaaaagttaaaggatctgccaatgatatttataataaatggaaagaaaaggtgaaattaaatttagtcaatggaagcaagagagagtttaataacaacataaaagaaatcattcaagagtttgatgaattaccactactaaatgtaaaaaaacctaaagttggtgttgttggagaaatattggttaagttccatccaacagcaaacaatgatattgtgggtattttagaaaatgaaggggcagaagcagtcgttccggatcttctagatttctttttctactcagcatttgacgcagactttaaagcaaaatatttggcaggaagtaagctttcaaaaaatttatgtaatatggctatttcgtatattgaaacatacagaaaaactatgaaaaaagaactagaaaaaagtactagattttctaagccaaaacacataaaagaattagctggcatggcatcacctatactctctcttggaaaccaaactggagaaggttggttcttaacagcagaaatgatagagcttattgagtctggcacaagtaatatagtgtgtcttcaaccttttgcatgtttgcctaatcatgttactggaaaaggtatgataaaagcactaaaagaaagatatccaaaatcaaatatagtggcaatagattatgatcctggtgcctcaaatgtaaaccagttaaatagaattaagctaatgttatcagttgcctttaaaaatttaggtgatgaacttaaatatcataaaaaacaaaatgaaagtattgtagagcagcaatttcataatgaggcaggtttaacacttgaagacaatatttaattaaattgtgttaaatttaatgttttagttagcataatcatgtatttataatgcataatgtacataatttataattaacgtacattatgcattaaagcttttgaaggaatttacatgtaattgtttttattacaattattgttttatgttacttttagtttatacaatggttattgtacagttttataggctattaaaataatgtgcaatttattaggaggtaatcgatggatacgcaaagtaatcatcaagaaaaagagaaaattaaaaataaaaaatttaaaccgcttgtattctttttagggatagtatacataattgtttttctatgtataagtacgcctctagtattattttttggaccgtatgaaaatacaagaaaagtgtttgtttcaacattacttggaacaagacatgcgtatctattaacagattttatgtcccaggaagaaataaataagatcctaggagttaacaaaaatacagaagaattgaaggatgatagtactcaaaatacagaaacagatttaaataaggtaaaggtgaaatatactagtggaaatgagataactagatatgatatacatacagacagatataatggatatatacttgaaataaaaaatccattaggcgttaaagttgcaatgacaaaatatctaggaaaaatgggacagaaaactagtgaaatggcagaagagaataatgctattgcagcgattaatggtgggtcctttgtagataaatcttctgatggaaccctttatgcgggaactggggcagagccagggggatttgttatatcaggtggaaaagttgtatatcctaaaaacaatgtaaatagaaataatgttgaaaatgttatagcttttactaaaggcggtcagcttattgtgggagatcatactcttaatgagcttcaaaagctaggagtacaagaagcaatgtgctttagaaggcctaatattattataaatggtaggcctcaagttaaagataagacatctgatgggcttaatcctagaactgcagtggggcaaaaagaggatggtacagttatatttttggttattgatggtcgaaaaatcacagcacctggagcaagtttgtatgatgttcaagaaataatgttagatagaggtgcgattaacgcaggtgctcttgatggtggttattcttctacaatgtactataagggagaagttataaattctccaaatgcttgggatggtgaaagatctgttgccacagctttttacgttgagtaaaataaagtttgtgaaaaattattataataaatagtacatataacacaaaagtagaagtaattttgaagtatctttgtaggagaggatagttaatgaaaaacctgataagaatagtagtatggacacttgtagcaatagtaattcaacaaggtatatttttatatgtggaaaatatatatttagcttcagatgtaaaaatacaagctgaaaaagttgaagaaaaggaaacaccaaaagataataagcaaaatgaaattaacattaaggatggagtttctaaagcatcagtatcctcagatggcagatttgttgcttatatagaaagtagtaaacttaaggtattagatagtaatgataatagtgaaaaagaattccaatgtgaagacggtggagatgtagtgttctataaatggttaacaaatgagaacaatataatcgttatacaaaaagtgcaaaaaaaaggaggagcttattttgagccagtatcttttgatgcgaagaaaggtgaaacacgacaacttgcagactttaatttaaatgagctgaaaatagatacaaagaatgcaagcgataaagtagacaatgtagtattttctactgcaacacatagtctttacataaaaattaataaagccaatggaaaaagtgatttatattatgctaatgtaatgaatcaattagagaaagtcagatcaaataaagaaattggaaatataatagtgcctactacaagtacaaatgcggtaatggaaatgggaaatggagcaaccatattaaatagtccaaacaatatagaaataccaaatgcaaaagttataaaaatattaggaaatgatattaatgataatgtatattttggtgaagaagttagcggtaatattactaaaatatattattcaacattaaacgaagggaaaataaaatggaatatgttgattttgccgaagccagtaagtaaagaagatataattgtggattattcaggaaaagtttatattaatgataaatctgcaggaagcgttttagaacttattagcaagaagtcaattaagtatgaaggagatcttctgcaatcttattctaaagggattatttctataaatggaaataagttaacaaagtacgagattggagaaaacagaatttctattaagcaataatatgcttaataaaaactactttgctaaataatcatgattttgataatacaaaaatataagaagtttttgtatttaaggatctatcataataagatataataattcatataagttttaaaagaataaaatataaaaaaagtcatataattaaatttatgtaaatataaaatcaatggtaaaaggggtggaatttatggataaaagtaaaaaaaataaattaattggaacaggagtcattgttggatccatggcagcattaagtggtgccatagcaatggggaagaggtttagaaataaaaaaataaaaaagatcatcgatattaagacatattctacaggtgtaattagaagttttggtactttatatttaaatgatgaaaagcagaaggtgccaggagattttgtgcagttcaaagacattgcttcatttgcaggtcaaaaaatagaaattaaagatactgataaagatgatgattataaattatcttggatagagataaatgatgcaggtaagaaattattgatttgtgatagaaatattttgaaaaatatttcatggaatgaactaaatgatcaaaatttagtttttggtaaagtagtaatagtagaaggggaaaaatacatcttaaggctcttaactggatatagtgaaaagaaaaattataagaataatgaatgggataagtatatagtaaattccaacaaaattgatggacttccaccaagtgaagattatgatgtagataataatataaagaaatttgatgatgagaagattaatggaaataataatgctttatggcattggtataatttctcatcttttactcaaagcgaaggcttaagaagtgaaaaattctgtataataagaggatattattcaacaacatattctaagcagtcagttaaagacttaaaatatgaaactgtagggtatagaccggttttagaattgattgagtaaaatataagcgtatgggcacttatttatagtagcttatgcgcttttatattaataaatagataataataggaggaaaaatgaaattaacaaatttaagtaaaagaaagaaaggaataatatttataactgcatctgcatttggatttgcaatgatgtcagcatttgttaagatttctggtgatttgccatcgtttcaaaaaactttttttagaaatatagtatcactcatggtggcattcgcactaatatcaaaacatagaggaaacttttttggtcaaaaaaataatcagaagacattgttgcttaggtcaatattgggaactttagggattttatttaatttctactctatagataaattagttctatcagatgctaatatgttaaataaattgagccctttcttcgtaattattttttcgggaatatttttaaaagagaaagtgaatataaaacaaattatagcaataattatagcatttataggaactttattcataataaagccctcgttaaacttagaaataatgcctgcaatagctggaattctaggtggtgtcactgcagcagcagcttatacatgtgttagagcattaagtgggaaagaacatccagaaactattgtattctatttttcttttatttctagtataattacttttccattaatgataatatactatgaaaatatgaatataatgcaacttatctatttgcttttagctggtatttttgcaagtcttggacaatttggaataactttagcatataaatatgcaccggcaaaagaaatatcaatatttgattatacaaatataattttttcagcaataataagtttatgtttatttggaattcttcctgattacatgagttttataggatatattattatcttcagtgcatctttatatatgtttttatacaataaagattgactatgagtaatgtaaaaaatattagctaaggaaaaaaatataaaatttattaataaaacttgacaaaagtggatagatataatattatctaattgagaatgattttcaaaattatttaattaaatagggagtggtacaagtaatgaaaatagtatattggtcaggaactggaaacacagaaaaaatggcagaattaattgcaaaaggaatcatagaaagtgggaaagatgttaatactataaatgtctcagatgtaaatatagacgaattattaaatgaggatatacttattctaggttgttcagcaatgggagatgaagtattagaagagtcagagtttgagccatttatagaggaaatttcaactaaggtatcgggtaagaaagttgcacttttcggttcttatggttggggcgatggaaaatggatgagagactttgaggaaagaatgaacggatatggttgtattgtagtagaaacaccattaatagttcaaaatgaaccagatgaagctgaacaagattgtatagactttggtaagaagattgctaatatataattaaatttggtggtgatatgatatgagatatctagatttttacaaaagattagatttgatggacgagaaggaatatatagaaaatttcttggtatataattcatcattagtaatcgcaggggttaaaccagctgtaactataaatttgaaaaaaagtaatgaaaagatgtatattggttggaatgacttcggaaaaaaatttataaagaatataaatctaaagttcatagagttaagagaaaataatgattgtatgataataatgatttatgatgaaaatatattggaaaaagaattaaataaaaaatcacatatagattttttagtaaacatagggtatccttctcaaataaaaatagatagatatattgatacattaaaatttagatataataaatatcactgccctcatgagcttggattattcctaggaataccatttgaagatgttaaagattttatggaatgtactactaaaaaatgtttactatgtggatactggaaagtatataacgatagtaagaaagcaaagatgatttttagcacatatgacacagttaaagaatatacaataaataatatgcttgagggaagtttatcgcgtgacctcgctttaagtataaaaaactccttttataaaaacgctttatacatttgattataaaaattgtatttagcaaatagataatttagattattaaaattgattaatataattaaaaagttttatcaaaattttgaatacaaaataaaatattcttggtaacgcacactaccatgaatgtgagtaattaaccaccaaaagtttaatatttagtgaccacacaccactaagtattatgactaaacgatattttataatgtccacacaccattataaatatcttcacaaatagtacaaacgaataatttctatttaatataataaagtagatacatttcataaaattcaaatatggcccacaaggtttacaaaaactttgtgggtctaaaattttagcaattattaattcttatcaaccaatagaaatattttagtattaaggttaaattcattttaataaatttttacaataatagataattaaagtataatttgtttaaggatatttttttgtaaaatagtaaaaaatataaaaaacatcattagtggctaactaaattaattattattttaacaatatctaggcgaaatcaaagattaatagataaattatttatggtatagggaattttgaagaataaggatgtgagaaaatgaatattatgttcaacaaactttttgaaatagataaagtaagtgattcaattgaaaaaatcaattttagggaagcagtaagaggaataataataaaggataaaaagattctaatggtacattccaagaataaggattataagtttccaggaggaggaatgaaaaaggatgaggggcatatagatgctctgaaaagagaagtggaagaagaaactggatatgtttgcagtaaaattggtgatcaacttggaattataacagaaagaagcaaagatagatatgttaataatagagtttttaagatgatttcttactattacttagcagaagtatcaaatgtaaggaagcctcaaaaattggatccatatgaagctaaattaaaatttaagccagagtggatacagatagaagatgctattaataataatgaaaaaataatatcatcaggagtagaaccgattgcaaactggatttttagagaaacttatgtgttaaaagtgataagagattatctaaatagatttaataaaataacataatgattaatgcgtgtatatattgctatgataaatttatatctaaagttttagtgaatcaaatactcatacgcaatttaaatgtagaaatttaattaaagcatatatattaaaaaggctcgaaagaaatgtaagaaattttatgaattaattcatattacacagaatattaataaaaacaagtgttagtcaaaagaagaataatctaaataccttattttactgataaagtatgtagagtaaggtggtgatttttagtaataagtgataagattataaatagttataaaattttatatcaaagaaagaatgatatatgtttatgaaatattaacgatatgtcattctatttgtgtgtttttataaagaatggattctaattattgatttgggtatagcgtatatcaggatgcattaaagaagatagaattattattgaatatatgagcattaaattcttggagcagtaaggagggatataaacactaatatagagatatataatgtgaattgaaaatggacaagggtaatagctataaatatatagctttaatttttgtttaacgttaacagaaaaaactagtaacttgggtgttttactagataggaagaaggatattgtgtggtaataagaaaagatgttttaaagttagcaatacctataatgatagagcaaacatttgttatgttattaggtacatgtaatacaatgatggcaggacatattggtgaacaagctgtatcagcaataggaatggttgattctataaacaatatgtttatatcattttttgcagctttatcagttggtgcaacggtggtggttgctcagcagataggaagaaataaacctaagaaagcaaatgaaacagctaaacaagctattatatcaggtattttagtatcattaattataacattgcttttgtggattttcaggattaaattaattaatgtactttatggttcagcagaagaattagttaaaattgatgcaaaactatatttggagtttactttgcttacgtatccatttatagcaatagaacaaattgctaatggtatactcagaggatgtggagatacaaaaactcctatgcaaataacaatatttatgaatcttataaatattattttggggtatacattgatatttggaattaatacactaagcataccgtcatttggaatagctggtgcagcagtagcaatcgcaattgctagacttattggtactttaattataatgttagttttatttagaggaagtaaaattattaaattgaaaaatatatttccatttaaatttgatatggaaatacagaaaaatatatttaatataggaatcccagcaggtatggaacaagtgatatttaatgcaggaaaattaatagttcagatgtttatagttacaatggggacagcatctattgctgccaatgcaatttcatcatctattgctataatgataaatgttccaggaaattcactttgtttagcagcaacaacttttgtagggcagtacgtaggcagaaatgatattaaaggtgcaaaaagtacattaatatacttgactaagtttggtactatctgtttagtatctttgggcttgatttttatacctatatcaaaatggttagcatctctttatacaaatgttccggaggtaataaatatatcatcaacattaactagaagtaacagtatagcattaattgcttgggggatatctttcatactttcatccggccttaaaggagctggtgataccagatatactatgttaactgcatttataggtatgtggatatttagaatatttgcaggctatattttaggtattgttctaggaattggagttttaggaatttggatagctatgtatattgattggattgtacgtggacttatgtactgctttaggcttaggggaaataactggcttaagcatagaatttctgattaaaatagttaaaagaagttatctaagaataggaaaataataatggatgattaacattaatttttattatttttagataacttcttttgtatagttataagaaatttgcaaagatattaaaaaaatagttataatttaaaagaaaatgtttacaataataacggatgagattataataagtaatagagtgtttaaaagtttaaagcattaaatattaatgtaacttttaacataacctctaatactcattaatctctttacatataattggactccactttggagttcttttattatgttcaagaaatattaagtacataggagaagaattatgagaataaggtttggctatgtagcaatttcaatgaggttgggtaaaaagatttctagttctagcacagttacatttacaaattataataaaattatttctgaaatgaataaattagataaactaaagagtataacactatctaacttaaatgatctagagaaaatacttaagtataatgtggagaatcaaatacacttttatagaataacatctgctttaattcctctagttacccatcctgatgttgggtattggggacatagagagatttttaaaaaggattttgaatttattggtagaataattagggaaaataatatgagagtcgatacacatccagatcaatttaatgttttaaatagtgcaagtaatgagattgttaaaaactctatcagcaatttaatgcgccaagtagaatggtttgaagatcttgggtatttacatggaaaaatggttttgcatgtgggaggagcaactggtggaaaagagtcagggataagcagattcattgataatttttctctaatcccagaagaaataggatctaaattaattcttgaaaatgatgataaaatatatactgcaaaggaagttttagatatatgcagaactttaaagcttccgatggtattagatgttcatcatcacaattgcaataataatggtgaaaatatagaggacttacttgaggagatttttaatacatgggataatgaattttttccgcctaaaatacatttttcaacgcctaaagaccacgataaagatagaaaacatgctgattatataaatgcagaggatcttgttgaattcttagaaaaagctaaggttttagatagggattttgatataatgctagaatgtaagcagaaagatgaggcactgtataaattagtaaaagatataaaagtcataagaccacaatataaatggattgataacagcacttttgaattataaaatagttttaactacctagaaattttaatattttaggtagttatttttatgaatatatatttgaatttagcatcattaataatattctgatataatagatatatatgtttttggaggtaaataataatctgggaaggaggaaagtactgaattgtgctgctttataacataattttaacaaaaatttattccaatgggattcatatgaagaaagaagggatttattgatgagaaacgttattagaaatctattacttggattaataataatatcagcaataatgggacaacctgtttttgcagcagataatgatttaaactcatatgtatataaccatttagaaaactgggacacagagtttcaaattgattattataaatctgatgtattagaagtagtacaaaatattgcaaaagacgatgattacttaatgagatcactagagaaaatggtctatgaaagggttggagataaagcaacattaaaggttacttatagaacaacaaaagatcaagagttatatattaatcaagagttaactaaagtagttaattctataactaccaatggaatgagcgattttgataaggttaaggcaataaatgaatatttaataaatagatttgaatatgatgatagtcttgtatctaataatgcctattctgcattgacaactggaaaaactacatgtcaaggttatgctatgactgcttataaaatgcttaaattagcaggtgtagagaataaaattattattggaaatttagatggtgttcctcatggatggaacttagttaaattaaataataagtggtatcatttagatgtcacaaataatgatgcattaggaaataataaatatttccttagacaagataaggttctaaaaaatgatggatttacatggaaagaaagtgactatccagaatgttctgatgattataattatgagaataataataaagcaagcagctatactggattattatctgagcttaagtcaaataaagatggtaagtggaatttagtcaattctgagtggtgttttttggaaaatacaggacattatgcaactggatggaatataatagataataattggtattacttaggcaatgatggcataatgaaaactggatggatatactctaatggaaaatggtattattgctatcctggaagtggggctatggctcttaattctgttattgatggaaaatatagagttgattcaaatggagcatggatatcatagctgtaaccttaaacaataaagtttatattgacaaaagcttaagttttttgtacaatttaaacaatttaatatatcgcataataaggaaagtaatttattatatttctttattctagattttcaataaaagcaatgaaaagaataagtagaaattagtgatgccatacagaaagttaccggttgatgagaggtgcatggaagctggttttgaatacatcttagagcttcaagctgaaaaaagtttcttttgagtaggtgatgacggaaccctgcacccgttatagtgctaaagtataaccaaaattttggcgtacttgaagaggttaatcgtgtgagcgattaatgaattaaggtggtaacacgagagctatactcttgtcctttatattttaaaggacaggagttttttttattgcacatattgaatcttgtaacgcttacttatattaaaaataagaaatatttaggagttaagaagatgaaaaagaatgctgaagaacaaattaaaattataaagaaaggaactgcagacataattagtattaaggatttggaagaaaaaattgttaaatcggtaaaagaagataaacctttaataattaagttgggattagatccaactgcaccagatattcatttaggtcatgcggttgtattaagaaagattaagcaaatgcaagatttagggcatcgagcagttataataattggagattttacaggtaaaataggagatccaaccggaaaatctaaaactagaaaacctctgaccaaagaagaagtagtggagaatgcattaacttatcaaaagcaaatttttaaaattttagatagagataaaacagaaattaaatttaatagtgaatggttatctaaactatcatttgaagaagttttaaaactggctgcgactacaacagttgcaagaatgctagaaagagaagattttaaaaagaggtataattctaacacggctattggaatccatgaatttttttatcctctaatgcaaggttatgattctatagcattagaggctgatatagaattaggaggaactgatcagacatttaatattcttatggggaggacattgcaaaaaaatgctggaatggagcagcaaatagcgatatttatgcctatattagaaggtctggatgggaaggaaaaaatgagtaagagcttaggaaattatataggaatacaggaaccagcagaaataatgtttaagaaactaatggaggttccggataatttcattataaaatattacgaacttgctactgatgaacatccagataaaattagagaaattaaggaagagttggataatggcaaaaatccaagagatgtcaaatttgagcttgccaaaattataacaagattatatcacacagaagaagaaactaaatctgcacttgaatattttgaaaatgtatttagaaataaaaatatacctgatgaagtgcctgaaataaatatatctactgaatgtagcttattagatgatgttggaaaagtccttgttaaaaataaattaataaaatcgtataacgaatttaaaaggcttgtaagtcagggtggagtgtatataaatatgcaaaaagtaactgattttaataatacaacaattaaaaatggagatgtactaaagttagggaagaagaaatttattaaaatagtaaagtagctaaaagtgtattaaaaagaattaagtgaaagaatatatactataattaaaagaggcagtcaattgaactgcctcttttaataaattaattcataaagaattatgattgcttttgcttttctatgtaattttcgtaccaattattaaatagaactttacatgaagcagcaactggtactgcaaggagcatgcctaataacccgcctacatttcccccgattagtatagccatcattgtaaataccgcatgcaaacctacgctatttccaacaattttaggggctagaagattattatcaatttgttgtacaactagcatagcaactatggagtaaagtatttttataggagtaccacttaaaagtcccataatggcagcaagaatagtaccaataattgggcctacatatggaatcatattgcttattcctgcgattataccaattacaaaagcgtaatctattccaacaattgaaagtgctatcgctgataatactccaacgaaaaaagcttccagcaattgaccgcgcaggtacttagcaaagacttcatgaacaactctaaaaacgtaaataattttattgcctaaaatacttttaccaaatactaaataataaagcttattccatagtcctataaaatattcagaatcctttagaaggtatatactgattacaagtgcaataaaaaatgttgcaacaccacttccaattgacattatatatgaggtcatatttcctaagttgctttcaacatatctttgtaaatatataattccgctaataatataaggctttatattatctataaaagaattatccagcttatctaaagttccttttattgattcggttgaaaaggaattgctctttaagtatagggaaatatgttgagtcatatttataatagtagtattatttgatatctgaccgcctatcataaaatagattcctaagattaatcctgaaaatataccaataattaagatatatgtaatcataattgctataattcttcgagtagatgccttctctaatttatataatttgttctgctttagaaaagtttcaaggcctctagttataggatataaaagatatgctattatgataccgaaaagcagtggcttaattaaattagttaaatatcctagaaagtcaaatgcagatctaaataataatcccatatttaaaataattaaaaatgctatatatagtataacagctgtaataactatatatatggaatacttgaataattttttatcaaattcaattttcatataacggtattatctccttattttactttatcttaatttactattatatgaattatatcatattttaaagcaaatatatcacataaatatttaagcaaaacttataatgggataatggataactttttattgaaacatttcttaaagatttcatccatttctacaggtaaactatcttgcatgtatttaacactactcttaggaagtgttaatttaaaagtatctttctgattaataattgtgacttcagataagctattataaaaatacttatcaattttatgagcaagacataatattattgaaatttttttgcatattagaatttcctcttttttaaggatatttttatatttatctgataatttgtaatcaaatttaccgcttagtgctatggcgtaaccaagcattaatatttgtttatgtgtaagtcctgaaattaaggagttaattatgatatataagctatgtttataagcatgttttatagaaatacttacccctaaatcatgcaatttagctgctgcaccaagaagtttatattctaattctaaaaattcataatttggtttttcaaggtatttaaaaaatacaagagataaatcacgtattttctcagcatgtgaaatatttaagtcattatttgttaagatattgtttaatgagtaatctaaaatatcaatattatcaagagctttattcaatagtttttcgtataaaacaccttcacggattccatattgactaatttttaaagtaggagaattgcaatagttcataagcattacaagtgccgagaaaggtgcggtaaatatgtcagatctttctctaggtaatccctttaattttgccttttggttcgtattaagattgagaacatattcatgaattattttaacttcatcaaaaagcatagtataattatggagcaggtcaaacggatatttaatgaatttcttatgaattttcccaatcgaacgagctgttccgccaattcctattaagggcaaattttgagcaagctttagccaaggtaacttatcaaattcactaaatataaatttcttaaatgctgaaatagtatttttgtctgctggcatatcaaaaggaaatagcttagttagtggtatggatcctagaggtaaacttactccattaagtatttttttatctttcattaaagtgatttccatgcttgaaccgccaatatcaataagtaaagcatcctttatatctatcgtagctttgattgttatatatccataagctgattcttcaattccactaagaactctaatgtctaagttagtcttctcctttaccaaggataaaatataatctctattttttgcacgtctgattgcctcagtagcgactacaattatttcgactacatcatttttctcgcataaaatcttgaagaattctaaagtaattaataatttgcctattccttcatttgacaaattgtcattttcatcaataaactgaccgagtcttgtcattcttttttcttcatcaattattttaaatgaattattctcatatatttcatatactagaaccctcattgaattggaacctatatcaataactgcgatatttttcattgttcactcctcctctatataaataatgtgataaaaagttaacttgcatataataacattttaacttaaagttaacaaaaatattagattatattagtatacatttaaatatattacattattcaatgtgtatttaaaatactatatttacaaataattaaattaagttgaaaatgattagcttataggatgaggagaataattatggatgaaaattataaatatgataattacgaaaatttttttaatcgtgaacttagttggctggaatttaaccaacgagttttagatgaagctaaggataatacaaaccccttattggaacgattaaaatttttatccatatcaagttccaatctcgacgaattttttatggttagaattggatcattatatagtcaaattcaagcaggctttgatgaaagagaagtttctggattaacaccaagtgaacagattagtaaaatactttgtagagttagggagatggttaaggatcaatatcatacatatgatcatttatatgatcacttaggttctagaaatataagaattttcacgtatgatatgttaaatgaagaacaattagaatttataaatgactattataaaaatatattatatccagtcttaacacctatggtaattgattcaggcagaccatttcctttgttgttaaataaaacattaaatataggagttatattaaaagaaagtaagagtgaacaagaactatttgctacaattcaagtaccatcagttttaggaagactagttcctataccaggggggataggtgaaaactttgtattattggaagatgtcataaaaaaccatctaaaggaattgtttggatttaaagtattaacaactgcttgctatagaataactaaaaatgcagatttaagtttaaatgaagaaggcgcagaagatttgcttgaaacaatagaagaatctcttaagcagagaaggtgggggcttgccgtaagattggaaattgaagagacaaatgatagtaggattataaataaattagaagaagaatttgaaatttcggagaatcaaatattttgtataaaagggccaattgacttaacatttataaataaattatatagtattaagggatatagtgaacttaagtttgagcaaataaagagtctgcaagttaaggaattacaagaagacgatatatttcaagaaataagcaagaaggatatttttctgcaccacccatatgaaagtttttcattagtagtaaaattagtagaaactgctgctcaggacgaaaaagtactagctataaagcaaaccctatacagagtaagtgggaattcacctataatagctgcgctttcaaaggcagcagaaaatggaaagcaggtaacagtattagttgaacttaaagctaggtttgacgaagaaaataacattcattgggcaaggcagcttgaaaaagcgggatgtcatgttatatatggagtaattggattaaaaactcatagtaaaatattactgattgttagaaaagaaaaaaagggtattaaaagatatgttcatttaggaactggaaattataatgatgtaacggctaaattctatacagatattggaataataacatcaaagcctgaatatggagaagatgcatcagttatatttaatatgctttcaggatattttaaacctgaaaatatgagtaaaataactattgcaccgtacggattacgaaaaaagttggagcatctagttgaaagagaaactgagcatgctaaaaatggaaagaaagcaaaaataattgcaaaaatgaattcgttagttgatagaaaacttatgatagctttatataaggcatcacaagctggagttaaagtagaacttatagttagaggaatttgctcattaagacctggagttaaaggcttaagtgataatataacagtgagaagcattgtaggaagatatttggaacacagcagaatatattacttttataataatggaaaagaagatacatatatatcaagtgctgattggatgtataggaatttagacaaaagagttgaaactatgacagtaatagaagataatcttataaaaaaggaacttaaagaaatgcttgaattatatataaaagataatgttaaaagtaggatattgctagaagatggctcttatacaaaaattaaaagtgaaggtaaaatcgttaatgcacagaaggatatgatagagatttgtaaaaagtttaatcagaaaagttagataaatatatgatttaaataaatatgtcatatgttgagtagaagtgatataggcaaataaaattcggtagaattttattattagtattcttgaaaatggaaattagcttaagtagtgttaaatagagataaaaaaggctaaagtgttaatagctataatcgataattaattataagaatataattgagacataaatattaaattacattaaatattctaggagatgagcaaaatgaagaataacaaattaagaattttatctttagccttattagcattcctagctcaaggatcttgtacttatgcagcaagttctgataagagcgattatactaaagatgaattaaacaatttaactccaggatgggatgcaaaagacatagacaaaagtaactataaagttgattcctataaaaactcattttcaagtacgcagacaccagatgcaaaggataaggatactagtgatacaaaaagtaaagataatacttcaagtacaacaactgctgtagacacaagtgtagcaaatgctatcgtaagcagttcaccgagcacaggaaacagaggagatttttggggaaagacttcagatggaaaatggatattgattgaacaaggtgttccggtaagtggttggaaaatggtaagaggacaatggtattacatggattctaatggagtaatgcagactggatggataaacgatgggaacaactggtactatttaaattcagatggatctatggcatataatacctatgtaggcggttattatcttgattggaacggtgttatgcaatagtctattgaaaaataaattgttataagtaatttctaggcaaaacttacgtttgatttagtcaatcaagctgtgagttttgtcttttttattttcagtataaaggaattgaatcttcatatttaacaagcaaggtataataatttatcttaaatggaaaaattaaagatgataaaattattatttataatatgataaaagataatgatatttaaaattttaaacataataaatatggttaagtgcaggactaaagtatttactaacgaatttactcttgcaatcaagaagttagtttttcattttacaataaacataaatatatatgcttgacataaagttaactctaaggtgtaaaatttataggaaaggttcatattcatggaattattacctaatattcttatattatgaaatgataaaaaataatatagattgaggtgtgagaaacaaaattcatggattactatttttaataattataacttaaattatatattataaggagagagtgtttatggaaaattttaattattcaatacctactaaagtttattttggaaaagggcaaattaaaaatcttgctgccataattaaagaatatggtaataaaatacttatagcatatggcggaggaagtattaagaaaattgggttatacgatgaaatgattaaaatattaaatgataattcaatatcatatgttgagctttcaggaatagagccaaatccaagaattgaaacagtaagaaaaggaattaaaatttgtaaggaaaataatgttgaagtagttcttgctgtaggaggaggaagtacaatagattgtgcgaaagttattgcagcaggagtaaaatacgaaggagatccttgggatttagtagctagtccacaaaaaattaatgaagtattgcctatagtaacaatattaacactatcagcgactggttctgagatggatccacatgctgtaatttctgatatgacaactaatcaaaaaataggtacaggtcatgaaaatatgaaaccaaaagcttcaattttagatcctgagtatacttattcagttcctaaaaatcaaactgcagctggaaccgctgatattatgagtcatatatttgaaacttattttaatcatacaaagggtgtggatatccaagatagtacagcggaaggattacttagagcttgcataaaatatggtaagattgcaatagagaatccaaaggattacgatgcaagagcaaatttaatgtgggcttcaagctgggctattaatggattaatttcatatggaacaaattcaccttgggtggtacatccaatggagcatgaattaagtgctttttatgatataacacatggggttggattggctatattaacacctcattggatgaaatattctttagacgacactactgtttttaagttcgctcaatatggaataaatgtttggggaatagataaaaacttagataagtttgaaatagcaaataaagcaatagaaaagacatctgaattctttaaagaattgggtataccaagtactttaagggaagttggtattgaagaagataagctagaattaatggcaaaaaaggctatgaatccatattttaagtatgcttttaagccattagatgaaaatgatatattaaagatttttaaagcagcattttagcaaataccacagtgtacccttatgtaagaaaagtctaaatatattagatgaatagcgtacaaattttatgaaaattatatactaaaatattgacggcagtacatttactgccgttaatactatataaatttagagggagataatatttatgaagttattcagtaaaggtgataaagtaggaattgttgcttgttcaaatggcttagataaaagtaatgaattaaagatgaacgagctaggagaagcattgaaagaattaggacttatacctgtatttagcgataatttatataaaaattattctgtatttaatgggagtaataaagaaaaagctgaaatattaatgaatctttttatagataatgatattaagggaatttttgatgtatctggtggagacttagctaatggcatcttggatcatttaaattttgaaacaataagaaataatatgaaaccatttttggggtatagtgatttgtctgtagttattaatgctatatattctcaaacaagtatgcagacttatttatatcaaataaggaatttaattggtgatagaagagaagttcaagtggaagaatttaaaaatacatttatggataatggaagtaaacttttaacatttaattatgaatgggtgcaaggaagttctatggaaggaattgtggtaggaggaaatcttcgatgtttattaaaactggcaggtacaaaatatatgcctgattttaaagataaaattattttcttagaaagtttaggtggtgacgttccaaagatgttcacgtatttgacacaatataaacaactgggagtatttgaacaagttaaaggaataattcttggtgaattcagtgaaatggagagggagaaatactttccgaatattttagaaattaccaaagaaatagtaggaaattctaatattccaattgtaaaaactaatgaaattggtcatagcaaaagttcaaaatgcataataattggaggaaaaataaaattatagtttatatgaaaaaccatgtgtgagtagaagtgattctttttatatgcatggttttttgtattattttatggaatttatatgaattttaacctataattatatagtacataatgaatatattataatgggaggggaaaatgttaaaaaactttaggagattatctataacaatagttatgttattaataaattctattgcttttaccggatgtaaaattgatgcaagagataattatggtctggataaggacaatcctgttgcagtggaagtatggcattattataatggaatacaaaaaatagagtttgataaaatggtagaggaatttaataaaagcgtaggtaaagacaaaggaataattgttgaggcatttaatcaaggaagcgtaagtgaacttacggataaggtcattgatatcacaaagaaaaaagttggagcagaaaaaatgccagatgcttttatggcatatccagatacagcttatgagatagagaagttaggacttttatcagactttggtaaatacatgtcggagaatgaaaaaaataaatatatagacagttacataaatgaaggaaaattagatactgaagataagttaactatatttccagtagctaaatctacagaaattttaatggtaaacaaaacagattgggaaacgttttctaaggaaacaaatgcagatataagcgagtttaatacttgggaagggatcgcaaatttagctaaaagatactatgattggactgatagcaaaacagaagctaaagatgacgggaaaacttttttcggcagagatgctatggcaaattacatgataattggaagtcaagaattgggtgaggagatatttaatgttactaatgggaagttagaggttaatattaatgaaaaggttatgagaaagctatgggataatttttatgtaccatatataaatgggtattacggagcatatggaagatttcgttctgatgatgcaaaggtaggaaatataatcgcattagtaggatctacgtctggagcaggatactttccagattcagttataacaaatgatgatcaaaactataagattgaatctatgattttaccgcttcctaagtttaaagattcaaaagttgcgtatatgccacagcaaggtgcaggtatggtcatgattaaatctgattctagacatgaatatgcagttacagaatttttgaagtggtttacagattctgataggaatgcgaagttttcaatagtagctggatatttacctgttaagaaagaagcaaatcatagtgaatttattaaggggaaaattaataataatgatgttttggataccctaaaaaattcacaagaagctgttttacaagctatagatcaggaaagaacatacaagttttatgcaagtaaagcttttaatggtgcagatgaggcaagagatattttagaaaaatctatgctggaaaaagcaaaaatagatagagaaaaggtaaaagctttattgaaaaagggaatttctagggaggaagctataaagagttttaatacagatgataattttaataattggcttgaagatttaaggaaaagcattaatgcagttacttaatttgatttgtaatcaataaaattacaatggttcaaagtcactgcgagcggggtgaaataatgttcttaataaaaaataagaactctataattagaaagttacttattccaatggtaattgttgtattagcacaggtagtgctttttgtaagtgtggttttattgagtggaattgttggaattcttaaaaataattcatttaatttattaaaccagaaaattcaatcaagagggagttacattcaaaacgagatgattcaacattggagtaatgttagtgaatctgaaagcttgattaattctaatattttgaacaagcttcatagtaaggggattacggtaaaggatttggacaacaacacacaattcactaaggagttgttagaagatgtttcgagtaatttaatatttatgcttagaaagaattatgtaacaggagcatttttaatacttgataataattctgaagaaaaagtaggattatattttagagatttagatcctaattcaaatccaagtgataattcagatttattgatggaaagaggtcctgcttctattgcacaaaatttggggattcctttagatacatggtggaataataggtttatatttaatcaaagtaataattcatctccagaagactttttctcaaagcctataaacgcagctgcagataataaaggattatcttataaggatttaggatattggagtaaaccattctcattaaatgataaagatatacaaattgttacttattctgttccattgttagacgaaaatggcaaaccatatggagttattggaattgctatttcattaaattatctaaattcattactttcatatgatgaaatagactctaatggtaaaggtgtttatctagtaggaattgacgataacaagaatatgaactttgaaaagattacaacaacaggaccattagcagggaaaatacttggagaagaaaaaaatattcagtttaataaaaaagaaatatatgattcaatatatgagataaaggaaccggattcaaaaaatatagcctacgcatcaacaaaatatattaatttatataatacaaatacaccatttgaaaaagatacttgggcaattattggaataatagaaaaggataatcttctatattattcggagcgatttgaaaagcttctagctgtatcattaattatttcgactctgggtggagtaatagtaattgttattgtaggtgaaagggttacgaagccaatcagaaatttagctcaggatgttagagaaagcaatcctagtaaaccaatagaacttgggaaaataagtatctcagaaattgatgagttgtcatcagcaataatgacgttaagttcaaatgtggcagactctgcttcgaaaatgtctcaaattataaaattatttaatatgccgataggggcttttgaatataaaataggacatgaagtggtgctatgtacagacacatttttcgatgtaataggaattgaaaaatcaaagcgatttgattcatatgtagataaaagatattttagcaaaattataaagaagataacagaggagaaagaaagttttcaagaagagacttataggattaaaggagcaaataaagaaactaagtggattaaattaaaaattttagaggaagagtctagaacattaggagtagtaagtgatattacacaagaaattttagaaaaacaaaaaatagaatatgagagagactatgatatacttactaatatgttaaatagaagagcatttcacaatacagtaaaagaaatattagaaagcgatgttcttaaagtaggagcatttataatgtgggatttagacaacttaaaatatgtaaatgatacttatggacatgattatggcgatgaatacataagaaaagcatccgaaatattaaaagaatttgagaaatatggaggagttgttggaagaagatcaggggatgaattctatacatttttatacggatatgaagataagtacgaaattagaaaaattgtaaaaagtattcattctggtatcgagaattcagtacttatgctacctaataatagagagctaaaaattagaatatcaacagggatagcatggtatccatacgatgctgtaacttttaaggatttagctaagtattcagatttcgcaatgtataaaattaagaaaacagtaaagggaaatataagtgagtttaataaagaagagtatactgaggattctttcttgtttagcagtcaagaagatttaaataaattacttgatgaaaaacttattaagtatgcatttcagccgataatagatgcaagaacaggaaaaatatttgcgtatgaagcgcttatgcgttcacagttagagtctcttagaaatccccttcatataataaaacttgcaactgctgattcacgattatacgaaatagaaaaaattacattttttaaagctcttgagagttttgtaaggaataaagaggaattcaaggatgctaaactttttataaattctttgccaaactatgtcttgtcatctgaggatacgaagaggtttgaagaattgtatggagaacatcttgatagattagtaatagaactacttgaaaatgaacgctctaatggagataacatttctataaaaagaaaagtaattgaaaagtggaatgccaaacttgctattgatgattttggttcaggatataataatgaagcagtattgttagcaattacaccggattatgttaaaatagatatggaaattgtaagaggaattgataaagatttaaataggcagcagatttcaaaaaacctcatatcttatgctaaacaaagaaaaatcaaagttgtagctgaaggggttgaaacaagagaagaattaacgaaacttatagagtttggagttgactatctccaaggatattattttagcaaaccagaatttactccacctgagataagcaaaggcttagttatggatattctggaaatcaataaaaaatttaacacaaaataaaaccaagtcatattttgggggatagatacgaatggaaaaagaagtaggcgctaaagttgttaatgggaaaataataatagctgatgggataaatggtgaaataataactataaaagctaaagaatatgtaaatttatttattaatgatgtagaatgtgaaaagtttaaaccatatgaagtaagttctaaagataagatcacttataattgcgatacaactcctgcaaagagagaagtaaatataactatatctgaagataaaatgaaagcttatatgacagtggagtatacacctaagactgaatataaaataaaagacagagaattttacataaatttagctgtatctactgaagttctgtcgaaagaagaacctgaatactttactgttcaagagttatataaaaaactaaaagaaaaaggaatagtttttggaataaaggaagaatctttagaattgattttaaaagggtgctcgaatgaagttttggtcgcagaaggattggagccagttaaggatacaccgagcgaggtgaagttgttttttacaccaactcaaatggtttttccggaaccagattctaatgagaaagtagactttaaaaatttatttagaatttccaatgttaatgctggagataaaatcgcagaaataatccctgagattcctggaaagaatggaatgaatatttttggtaaagttatagagcgcgaatatattcgaagcttaccaattgatgcatcaaaaggatgtaaaattgaaaataatgatattatagcgcttattgatggaaaagcacatattgctaatagaagtgtaagcgtaaatcctatttacaccgtagaatcagtaaatatggaaacttgcaacattaaattctatggagatgtagaggtttatgatagtgtacaggataatatgtttgttagtgctggaggatcattagatgtaagccaaaatgttaatatggcgaatgttgttacaggtggagaaataacaatcttagggaacacaattaattcaaagatattatcaggacaagtagatataagaaaaaaagaatattcagatgttcttactgaatttaaaaatattttagttagtatgatagagtatattaacggattgaatctacaaaattttgaaagaaaagattttgtaaagacattgactgaaaagaattttgggagttttcaaaaagtagcattaaatataatttctttaaatataaaaaataaaacaaaacgcagtaaacttgtagattttataaaaggaaagatattaggacttaatatattggaaataaaatcaatctttgatctaaaaacattacttaacatattagacaatgaaatagattattatgataagaatataatagtcccgctagatattaggataggttattgccaagagtgcgagataaaatctacaggaaatattatcataggcggtaaaggtgaatatacttcaaagttaactgcaatgaaggatataatttttacaagatctgattcagtggccagaggcggtgtcttatctgccgggcaaaatataagtttaggagtagtaggaagcagagcatatatacctacaacgctaatggtaccacagtatggaagaataactgctgctaaagcatatgcaaacacagtattttgctttggtaggacaaaggttacattggacgaggatctgaaaaatattaatgtatattttaatagtgagaaaagggcaattgaatttggtaaaacggcactgtaaaactaatgactctaaaaatgtaaaaagatacagggcatggtaagttaaaaaatgctagttttaaaagaatttttggagaaaattaaagaattgtaaaaataataagtaagtatttgtctaaaaaatatatatgtgatataataagtcaacagttcatacaaaagactcgtatatttccgatattatggttggaaagtctctacctgctatccgtaaattagcagactacgaggtagtgttttagtgctaagtattattatattcgcatataaatacaacacctcaactttaagatggggtgttgtatttttttgaaaacttttctgaatatatgtataaagaatttgcgtgtctatgtatgattaaattttacatagggagattgaaagaaaatggaattaagtaacaaagagattttaatcgaagatttggactgtaaaaatgaagaaattagcgaacttctttatggagttgaagacaagcctaatttatctacacaaattttgctaggatttcagcatatatttgctgcgtttggaggaattatagtagttccattagttatttcgagtgcattgggatttgatatagttacatcaacagcacttatgagtgcaactatattgtcagccgggatagcaacttttattcaatcgagaggtattggttctgttggtgcaagagttgcatgtataatggggacagattttacatttgtagctccatcaattgcaattggtagtatttacggacttccaggcatattaggtggaacaatacttgggtcattagtcggaataggtttaagctttgtaatacgacctatgatgaaattatttccaccgcttgttacaggaacagtaataacattgataggactaactctattacctgtatctatggattgggctgctggtggtagtggttcacctaattatggaaacttaactaatatttcaattgctatgattgtaatgattataactttattgttaaacagatatggaaagggattagtaagtagcgcctcaatattaattggaatggcaattggatacattgtttgtattcctcttggaatggttgatttttcatcagtaagttcagcaagttttgtatcatttccaaagatatttgagcatggagttaactttgatcctaaattagtacttccgtttattcctgcttattttgttacaacaattggaacagtaggatgtttaaaagctatcggagaggtttcaaaggttgaaatgggcgataagagaattggagcaggagtattatctgatggacttggaagcatgcttgcaggtattcttggaactttccctaatacatgtttcagccaaaatgtaggtttaattccgttaacaaaagtagcaagtaaatatgttgctatgatggctgggataatattagtaatactaggatttttaccaaagtttgcagccctaataaatataatgcctcaaccagttttgggtggagtaggtattgtaatgtttggtacagttgcggcatcgggtattaagactttaagcagagtcgaattaaataaccgtaatttattaataatagcaacagcaattggacttggtgttggaattacattccgtcctgattttataagtcaattaccagaaggtcttaaaatgattttctcatcaggtatttcgactggaactattgcagcgctaatattaaatttattattaaaacaagaaaagagtggagtagaatagaatggaaagcttacataaaagaattttagaagaaggacaagcattatcagaaaatgtactgaaagttgattcgtttttaaatcatcaagtggatccggaattaatgtacgaaatgggtacatactttaaaaattactttgagaatcataaaataacaaaggtgtttacaattgaaagttctggtatagcacctgctgtgatgactgcaatgcaaatgaatttgcctatggttactctaaaaaagcaaaactcaaaaatactgaatggtgatgtttatcaaacaactgtacattcatttactaaaagcttagattatgagttgacattatctaaaaaatatataaatgatgaagataatatattagttatagatgattttttggcaaatggcgaagcggcacttggggctgcacgtttgatagaagaagctggagcaaaagttgcaggaataggaatagtaatagaaaagtcattccaaaaaggtgctcaaatgcttaaggataaaggatatgatgtatactctttggcaagaatagcgaaactatcaaaaggcataatagaatttgttaaataaagtatagataacccaactataatctatacttatgcgtatatctcaccgaaatgaataatatacttttattccagtttctaggtaattatgatgggtgattctaaggctataaagttgtactcaaagtgctagcctcaaagaacaagcgctcacagagaaagttcgaagaacgaaatataaaatttcgattctcactttttgaactagcacatttggaacaacttatagccaaagaatcacatccatcaaaattaccaatgaaacattccacaaaagtatattactcatttctagttggaagatatttcatagtttaagtatagtttatgattgtgatatctatattttcattacaaagtaaaaattaaattattcttattagcattttaaagagtgtttaataaaggtcttataaattgagttgttcaattttgcataatacaagcaaagttgaacaacttttaatattttatagagtatttaatttatctattagttattaaaaagctataaaaaaattattttttaagtaacttttttacaatagaattcatttttttgtgtttaatatacacgagatataaaataaaatactttattaggataaagggagtataatactttcttaaatcaattattgatttatgtcattctaaaaagtaaaatagatatataattaatttccaatatatgaaattctttattggaaagctatataaaataagaaggagacaaaaatatgaaagcttatgaacgtttattaaaatacgttaaggtatatactacctcagatgaatcttcagaaacacatccaacaactaaaagacaatttgatctagctaatatattagttgaagaaatgaaggaaattggacttcaagattgtaaagttgatgaacattgttatgtatatggagttatccctgcaacaaaaggatatgaaaataaagcaagtatagggcttatagctcatatggatacagcaccagcggctaatggaaaaaatgtaaaaccacaaatcatagaaaattacgatggcggcgatattgttttaaaaggaaataatagcattttgtcacctaaaaaatttccacatttaaaaaacttaaaaggtaagactataattactacagatggaacatcgttgcttggagctgatgataaagcaggtattgcagaaatacttactgcatgtgaaactataataaatgaaaatattcctcatgggaaaatatgtgtgggatttactccagatgaagaagttggacttggagcgcatttatttgatgtaaaaaatttcggggcagattttgcatacacaattgatggaggcgaggaaggtgaaatttcatatgaaaatttcaatgctgcagcagctgaagttaatattcatggggtatcagttcatccagggtctgcgaagaatacaatgattaatgcaacaaatgtagctattgaatttaattctatgctgccatcatgtgaaagacctgagcatacagaaggatatgaaggtttttattatttagatagttttaatggaaatactgaacatgcatcgctaaagtatatcttgagagatcataataaggaaaagtttgaaaatagaaaatcaacaatgcaattaatagaaaaattattgaatgaaaaatatggtgaaggaacagttagggttacattaaaggatcaatataaaaatatggttgaacttataaaaccttgtatgcatttaatagataacgctacagatgctatgaaaggtttaggtgttaccccaataatagagcctattaggggcggtactgatggtgctactttaagttatatgggacttccatgccctaaccttggaacaggaggccatgctttccatggcgaattcgaacatattgcagttgaaagtatggacattagcactgaaattataatagaaattctaaagagatatgcaaatcaataaatgggaacattaatttgaaatgaattattttagattatattataagcaaaaatatgaattattaaattaaatatgatacctcaggtttttaattacattaagagcctgaggtattattatattattttataaaatgcagaaaacatataagttcttaccaataaatacatttttaatggaagatgtatttaaatgaaactttttaaaaagttaagaatttaagaatttaagaacttaagaataaaggaatataagaatttaaatttttaacaatgaaaaaacggcaaattgcaataacaaattgaactaatttctatttatgacttaaacgcttgtattttcttaaactgcataaattttatctaagtgtgcctcaaataactcttcaggagtcttatagttaagtattctcctcggaagagtattcatccattcttctatgaaagcaatgtcatcagaagtgtagtctgaaatacgtttaccctttgggataaaacgacgtattagaccattatgacgctcattagtacctttttcaaaagatgagtatgggtgagtgaaatacacctttgtatccgtttcaatttcaagtgtggataagttagcaaactcagagccattatcaccagttatagtcttgaaagcttggctaaattgcttgccaaataaactgcgcactctatgtaagagcatcagcaacggcttcagcggttttagctataatatcgattaccatagcatatctagttttacgctctactattgtaagtagtacattatcattattagatttttgaccaataacagtgtcaatttcccaatgaccaaactcgtgccgagtgtttatctctactgggcgatctgatatgctagaaccaagttttttcttatgctttttaactctagtagattttgtatttctacgtagcttcattggtaagtcagtattttttatatctaataaaccaagatctatatggttatataatgtttttgtgcagaccatttgggaacgcttaaatctaccgttagcgatagcttcgccaacacaagcatctggtgaccatgaatgatttttaattttatccacagtatagtttatgaaatcactgcattctaagcgcttaaaagtgcggcagcagtttatacgatgctttttatatatggcttcgccagtatcggcaaggtatacttcaacgtatttttcttgtttaatttgagtggtagttccacgtctaatttcatttaagatagtgtttataggccgttttaactcttttgctattttataaggtgaaaagccatcttttagacgaagctggataagcatacgttcttcaaaattcaaatgtttatttttacgtggttctgtgttattatttgggtagtccatagtgattatcctccgtgtatgttttttgtttagcgattaaatcataacacagaataatccactatggattttttattagttcaatttcattttacaacaggtcacaatgaaaaaacttaaaaagttaacaatttataggttacatcagagtttgtagggtatacagaaattactataaataatagattcaagttattatgattagaatcttataaaaattattaacatagcttgttcgaaacattctacttatttctattagataggtagttcttgtgaatagcattaaagaaaaagtcagtaatttcttcattaattttgtcattagaactattatgaacttgattatttttcttttttaaacaaggagtatgttcattagctttttgctttttagctgaatcgaattttattatttttgaattgctcattataatatcatctccgttctttattatagaatgcctttcgccatttgtatattttacatacattaattccatgaacgcaccgccttatacttattaattaaaataaaagtatcaaataaatttactgataactaagtatatgagtctagcttatgaaatattacataataatattaaagtaatttttctcaccaataatatggggtatggtataattttcatataatcttataaaggaataaatatatttaatcatagttatattattaataggaaatatttttgcagttaaatattatattagtatatggagtgggataaatgaaaaataatgcagcacaaagagaatttaaaaagtataagagtcagataaatcaaatagaagaaatagttgagcattcaaagccaggagcattattagagcatgagagttcaataagaaagaaacttagacatcttaaggaattagaaaatcagagtttaaaagattttaatgaggtttatgagagatatgaagagctattagaaactgtttcaaagaaaatgcttgactactataataaaaataataatacaagttttgatttttatgaagtagtgcgtggaaattataatagttttttaaatcaaggattaatgacaatattaaccaaacaacatattcctaaattagttgcaaaagaatttgaagaaaatttcccaagtaatcctaaagatgagtatcgtcaagcacgaagcatgaaaagaaagttctacatacatttaggagatacaaatacaggtaaaacgtataatgctttagaacgtcttaaaagtgcaaaaaaaggtgtttatttatcaccacttagaattctagccttagaaaattttgaaaagttaaatagagaaggagtaatttgtgatcttttaactggtgaagaggaaataataaatgtaggatctactcacacatcatgtacaatagagaaagttaatttaaaagaacattatgatatagccgtaattgatgagattcagatgataagtgatccttttcgtggaatggcatggagtaaagctctactagggcttcaatgtgatgaaatacatatatgtggagctgcaaatgctaaatatatattagaaacaattataagtgattgtaaagatgaatatgaaataagagaatatacaagagctataccattagaagttgaatataagaattttagttataatgatgttcaggaaggtgatgctattgtagtgttttctaaaaaaagagtattagaaatagcagaggaatattcaagtagaaacattaaggcaagtataatttacggtgatttaccacctgaagttaggaaaatgcaatacgaacagttcattaataaagaaacaaagattcttgtgactactgacgcaatagggatgggagttaatctacctatcagaagaattatatttatgagtataaggaaatttgatggagaagaagtaagagagttaacttcacaggaaataaagcaagtaggagggcgtgctggtaggcttggtatttatgacgttgggtatattgccagtgttggcggcaatgcagatataattaaatctaaattagaaacagaagacgaggttataaaacaagctgttataggcccatcagaggcaatacttaagattagaagtctgcctttaaatgaaaaattagccctttggagtacaagaacagaaaaattagattattatactaagatggatgttagtgaatatattttgattttggatagactaaggaaatacaagcttaatgaggaaattcaatgggatttactgaaagttccatttgatgtgtctagagatgaacttatggatgcatttttgaattatgtagatgaactatttgtgaataaacagaaagaattatttaaaccccaaaactttaatggtggtttggatgatttagaaatttattatcagaagataaacatgtattactcattttctaaaatatttaatttaaaactagacgttcaatgggtttatgatgaaagattaaaagtaagtgaagaaataaatgatatattattaagactttaatatagatagcacaatcgtaaactatacttaaactatgttattcatttcggtgaggcatacgcataagttcgggtcttagtctggttatctatatcaataattaataatgtaataggcaataataagttgaggggtgagcttacttaaatttgttattgcctattatctcgtaaaaacatatttcataacctgcctattgaggtgtcaggaggccagaagcaaagagctgctattgctcatgcattagtaaatgattctgatattatcaaactatttattttcattgaatattaatcaatattatatcattgaaatagtatagcacatttatgaaatgttgtttacaaatatcaataacatcgttaaagtaatatacgaattttaaaatttatctcaatgattatattaaaatggaattttataaggaattgaaaaggttaactttaaaattatcataaaattttcttgaaaattgtaataatatatttatatatatccaattttgaggtatactttaattgtttgagtttttttataataataagccgatttacaaaataattaaaaaaggggaacgcaaatgagtgaattaaatcatgaacttggaattatagcattagaaagttgttcagagttaggtaatgctatagacaagtatatccaaaaaaacagaaattgtactgagtcattcttagtgccacttgatgaaatacgattttctaatggtgaaggaaaagttaaaatttctgaatctatcagaggaaaggatatttatattttatgcgatgttggaaactatagctgtacatataagatgttcgggattgaaaatcacaaaggtcctgatgaacattttcaagatataaagagaactgttgcagcaattagaggtaaggcagcgagaataactgtaattatgcctcttttatatgaatcaagacaacatagacgtaaaggcagagagtctttggattgtgctttagcacttcaagaacttgaaagattaggtgttgatgaaattatcacttttgatgtacatgaccctaatattcaaaatgctattcctttactatcttttgaaaatgtgtatccaacatatgatattgtaaaaggaatcctatcaaatgaggaatcactagaattagataaagaaaagctacttgtaataagtcctgatactggagcgatggatagggctatatattactcaagtgctttaggagtagatgttggcttattctacaagagaagagatcattctacaattgttaatggaaaaaaccctattgttcagcatgaatatatgggaagagctgttgaagataaagatgttttaatagttgatgatatgatagcatcaggagaatctgttcttgatatagctaaagaattaaagaaaagaaatgttaagaatatatatgttgcagcaacttttgctttctttacagaaggatttgaaaagtttaataaggctcatgaggaaggtttattgacaagaatatattctactaatttaacatacataccagaagagttaaaagactcagcttggtttaagagcgttgatatgtcagagctttgtgctagaattatcaatagattaaattatggaagatcaattgctaaatacatggatgcaacaagaataatacatagcttattaaataagtaattatttatatttattttatgagaaaagagctacttaggtttttaagtgaaataacaatttcatttaagtacttaagtagcttttttgatagttatagtagtgaaagtaaatttatataataaagcagtgtacatactataataatgttaattataaaaatgttcttcttgatgctattaatctaagctcagtagcatctgttatatcataattatactcactacctctagaatatgctgaatttttattataaatatattctgaattactgaaaagtgaatttaaaacagacttacatagtttaaatacataagttagaattttagatataccttttgaaaccttattaagggaaatatttttattagttgtataggttaccaatttcaaattagatttattaatagctttaccattcataataatccctccagtttaaaaaaataatttgtattcttttaatgatatttaaattttaattacttctatactaataatataaatcatttatattaaaactgcatcctcatataaattcccatttggtaaaatagcaggcaattttctgaagatatttataaaaataaatttaatattatctttatattaataaaggtttgtcaaatgttaataattaataaatttaatacaaatttcttctaaaatggatcaaaaaattaatatattttagtaacaatatcagtaataaaagttatgaatagttaatatatataatgtgaaagagaattaagtaaaataattgtttatataactacataatatcaagtgaaacttgattcaggtggggtcttatcctcagttaaatcttagtctaacttatctatggtccagccactgttatcagacgcttaaaaaagtcagtgacaacattgactagacatcagataaattatgttgttattttagtagagaagactcatatattaggattttgtttttagaatgttgagatttatatttagtagatgccaggggaggataagatgaaaattaggtgtaaatttgcattaatagtaaccttgctattttttatgacaatgatgagtaatgaattgccagcttttgcagaacctgaactatcactcgaacaagctatacagaacattcaagaatgtgatagcaaaattgataataatatagacaagctaaataagattaaagaggaagtttttcaaaaggaaaagcaaataaaggataatgaagaacaattaaagatagctaaggaggatgtagaagagaaagataagaaattagctgatagattaaaaggtatacagttaagtggaggtgttgaatcaacaacacttcaatacttagatgctttaatttcttcgggcaatgttttagaagcaatgaataaggcatcattaatatataaaatatgtgaaaatgataaaaatatgattttacaagcaaaagagtcagaaaaaagaatcatagaagtaaatgaagagatagaaaaaggaaaagctgatttgcaaaaaaatgaaaacgatattagaaatcaagttgtagaattagaggatcaaaaagataaattattaaaatatattaaagaaaataatatattattgagcaccaatacaggcataactgttccggttacattatcatctgatattactggtcagaaaaggtctctaatagaagaagctgaaaaatatttgaaagttccttatttatggggaggagagtcaccagcaggctttgattgctcgggtttgattcaatatgtattcaagtcgcaagggatatatatacctagaatatcacaggaccagcagcgttttgcgaaaacaattagcatatctgaaattaaaccaggagatttggtatttaataaaccatcagaatctacacacgtagggatgtatataggggatgatatgtatattcaagcgcctcgtactggagatgttgttaaaataagcagattaagcagatcaaatatgaaatatgtgggaagagtattagattagagccatattaaaaattacagcacataaggtacttcaaatattaatagcagccttatgtactgatgttaaaaatatttaatcatatatatcagaaaattctatttttattctttggatattactttcttttgctaaatcctcatctgaagtaatattttcgctttctggcaaaactttaacgggaagctctattataaactcactgcctttgccatattcactattgattttaattgtaccattgtgaagttcaacaagagattttacgagagaaagcccgatgccactgccttctctttttcgcgaaagtgatttatctacttgaacaaatctcttgaaaatagataattgtttatctttagggataccaacaccagtatctttcactgagaccataatgcttgaatctttatctaatatatttacaaatatacttcctccagaggaagtaaactttatggcatttgaaagaagattaagcattattctttcgattttatctgcatcacaagccattgtcttttcttcaacgtttgtatcaaaaataatgtctaaacctttgtttttagcataatcagttacagataaagttatatcttctatagtggatatgatattttcattttttaagctgagtttaaagtattcagcatcaattttagtaatatctattaaattatttactagcctcaataacctatagcagttttgtttcataatattatagtatttgcttattttgtctttgctatctgtattagttttgtttgctccaattaaatttagaagttgcagtgtgctaagcattacgtttaatggagttctaaattcatgagataaatttgcaaaaaattctgttttgagtttatcatattctgcagctttatctaataaccgactttgctcttgtatttttaatctaagattttcagattttttatgttccgaaatatctcggataacacttaatatacatggattgccttcatattcaatagctccagagtatatatttactggaataatatttccatcgaattgaatcattttttcttcgattataggtactgatatattatgtttaagcactttttcaaatctattaagtataatatcgcgataatccttatgaacaataccaatttcaaataagtctctacctagaatacttttaaaattgttaatgtttagtaatttttccacgcccttattcacaaaaagtattttataatttgtgtctaaaataaaaactccctcataaatactgtctaatatgtataagagttgccccttcttcttttcaattaatttataagtatcttttagttttttatatttctcttctctgagaaattttatattgctaatttttttcttattttttaattcgagcttccaatcaagtataatcttttcaataaacatatggaaaaaatctaaaccgacaaaaaaagaatcgtaaggtaagtttaagttgttagctagcatttgaatttcttttatactgtcctcataaattcctgtgtctaataggagaagcttattgggtttcctatctaatataactgaagtattatctttatccatgtttttaagccagcctgatgttataacatatgaatttgtatttaaaagattattaactacatctttattaataaataagttaaggcagtgttccattttatatagtgtgcatttttctttgttattaataagatcttccaagttagagcagcaacaattattctcaataataataaaaattttattacatctttcttcacataaattaatagcttctattaaacattgattttttttgtttgttgcttttgaacatgtagatgcaaatggtataatcataacattttttatattataagtctttactgcaaattcaatctcttcaataaaattttcacaaattactatacccaaattagttttcatgttatcctcccattttagctaaaagattaatttacctaatagctgatttttactaatagaccgtttattattcaatagtgattttgtaagtaaaagtgactattccatatgtttaaataattagctatgtatataggctttgctaaatatatattaaatttataatttatcagaaatttgttttagcatcaaaagttgattaaacaaatgcattaatattataccccttttttttctaaaattctataaaattacccatttttacagtttatttgatattataaaatgtagatagtatgcaatattaagagcaagctaaattaaaaatgaggggacaagataatagaaactgatacagatataattttttatattataaagttactgttttgcatatactatgtttaacttaaaagcaagatataaaataaactaataaattttggaggtaataatgaatacaaaagagaattttttaagcaacgtgaaaagtggtgaaaacataaagatatcattaatggtcatgagaatattatttagggatcctgcaaaaatagtatgtatattggctgataaaagtggcgaaataaaggcaaatcttccaaacaaaaaggatgatattgctgaaggaagagtagtagaaattgaaggaattaaagatgggattctagatgtaaaaacatatgaaattattacaaactacaacatttcggattatcttccaacagtaaataggcctgttggggatattatgcaggaaatagagctttatacaagtaaatatataatttcaaaagaggccaaagctttgaacgattatttctttaaagacgaagagtttctagataaatttaaaagaggtataggcggagtatcgatgcatcataattacataggaggacttgcagaacatacattaaatgttatgcatttaactttaatgctttgcgaaagatatggttgtagaagaacagaaattgccatacttgctgcaaaattacatgatatagggaagatttatgagttatcttatgacggtccatttaaatatacacttaggggtgaaatggaagggcatattgttattggtgtagaaatgatagataaggcaattatgaaaaatccttcatattatagtgaggattttatcatgagaataaaaggctgcgtaattcaacatcatggaaaacttgaatatggttcgcctagagaaatgagaatggaagaatcttttataataaattatgcagattcaatagatgcgacaatgaataaaatttctcaaataaaagataaaacagagccaggaaattggtcagaatacgatagaagaattgaaactaaattatatttatagttaaagaaaagggatgcgattaattatatgaatattttatttatgaaagtaacactaagagcatcatgggttcactcattaaaagagaaaagaatgattgtaaaaagtataatacaaaaattaaaaaataagtttaatatatctgtatctgaggcttatgaacaggatgttcataaaacaatagttataggtattgcaggaatgtgttcgaattcagctcaagctgattctactatggagaacattataacctttatagaaaataatacagatgcagaaataatagatatacaaagagaggatattagagtgtaaagatagagacacataaatataagtgtttgagggatgtgtcatagagcaataattttagattctatatataaaaatacaaatttaaatccgatacttattaataaattgtgtaagtagtgctaaaggataccaagtcaatacgataaatttttcatactgacttggttatttaattaatatattttattaaacttgttctgcaatatagtaaagcaattgctcagtagcatcccaacctaagcaaggatcagtaattgattttccataaatgtgttcatcaattttttgacatccttcttctatgtaactttctatcataacacctttaactaatttttttaaatcattgttatatcctctgctgtagagtatttctttaactatgcggggttgctcagcaaatttcttcatagagttagcatgatttgcatcgacaattactgctggatatggaaagttacattctccatatagttcagaaactctcattaaatcttcgtagtgataattaggaatattattaccatgcttattaactgaaccacgcataattgcatgcgcataaggattaccagtagtatttacttcattatgcctatataaaaagttatgttttgcatgagctgcttggattgagttaaacattactgataagtctccacttgttggatttttcataccaacagggacatcaatcccactagctgtaagtctatgctgttgattttcaacacttcttgctccaatagccacgtaagtaagtaaatcatcgcagtacatataattcgaaggataaagcatttcatctgcaggagttaaaccagattcttctatagcacgaataaacatttttctgattgaaatcaatccttcaagaatattaggtgatttttcaggatctggttgatgaaacattcctttatatccttcgccagtagttctaggcttatttgtataaattctaggaacaataaaaagcttatccttaactttttcatttacttttgcaagtctgctaacatagtcgcaaacagaattttcatcatctgccgagcaaggtcctattataaccacaaacttatcactattgcctgaaaatattttcttaatttcttcatctctttctgctttaatcctttttagattgtcagctagaggagtaatttcttttatttcctctggagatggtatttttcttacatttacaaaactcattgtaaagcccccttgtataaaattatatatatctaaaaatgaattaaatatgttgtatactataaataatatagtgctatattattttgaaaataagtatacatcatttgtaaaaaattcaaatttagtatatctatattactatataattgctgaaaaatctagtaaagtttagaattttgcaaaaatattttgattttttattctttaggaattcatattccagtaaaatctatagataatttaaaaaaggtttattggatagttttggtacttaaaaaagaataaaaaagaaaatcttattcgcctgcataaaatgttcttaatatatccataaaaaaatttacgaaatagtaatcaaagtagataatataatcgtttggtttatgaacgaaaatgagataaataaatggaacatttttattgtttgcaatttaagtacttttttaggaatttatttaaaggaaattgcatatattttataggtaaaaatatttgagaggtatttatgtctatttattttgatttaaaaactattaatgaacttacaggaagcaattcgtataggcagcctaaagaacttacattagatgatttatcacaatatgatggaagaggaggaaaacctgcgtatgtagctatagaaggtgtcgtttatgatgtaagcaatgaatcaaattggagcggagggacacactatggtcttaatgcaggtcaagatttaacagaccaatttaattcttgtcatggaatgatgcaaattcttaataatgcacctaaagttggtatattagtagatgataataacatgggtaacatgaattttgatatcaatgaaaatatgaagaggcaagttaagcaaaatacatcgaattttagaccagatgattggatcagatatgttgagccaatagtgagttattctttgagtgacaataatcagggaactggattgcaaggtgctggagcacgacgctcatatcaaaaagctattttactaggagtgcttgttggcttaggaagaactcctcaggaagcaattacacaagttcaacagtggcagaatacaggagcaactactttattaggaggaccaagtaccggaggaacaacaggcggtggcatgggaactggaggaacaacaggtggtggcataggaactggaggaacaacaggcggtggcataggaactggaggaacaacaggcggtggcataggaactggaggaacaacaggcggtggcatgggaactggaggaacaacaggcggtggcatgggaactggaggaacaacaggcggtggcatgggaactggaggaacaacaggcggcggcatgggaactggaggaacaacaggcggcggcatgggaactggaggaacaacaggcggcggcatgggaactggaggaacaacaggcggtggcatgggaactggaggaacaacaagcggtggcatgggaaccggaggaacaacagccggtggcataggaaccggaggaacaacaggcggtggcatgggaactggaggaacaacaggcagtggcatgggaaccggaggaacaacaggaggtggcgcaggaactggaggcaccactagaggtgaatcaatagtaagaaatagacttttttttgattagattaaatattaaaagcataaaggatgtgatattattcatatcctttttgagtataaatataagtttgcttagtatattaatttacaatatagattttacttatgattaaactaacattctttcaattttgttgattaattccataggtaaatcacctcttaatgatctttctagcaaatttggattttctatgttatttgttaatagaaatttttctattagcgctgcttctttttttctgttaggatctaattgatagagtacataccaatcttccaaggacattaaaggaatatctatcccattaatttttgttgattttgagatcgaatcagaatgaaaaatatatttgaacgtaccatctttatggttaatctttaatccagctataatattaacctcagagccttctataatagatttatgaaagtattttggtgaatataatttactttctttgattgctatttcattgctcatatcgttaaacatttcatcaatttttctaatatcgtttacatcaacgaaaatatatatatcatctaggttatttgaaagaccaaagtgacttagtaagactgatcccccaacgccccaaacgatatttaaatcattaaacttattccctatataactcaaagctttaagcattttttccacctcttgaatttatattaatatagattattgatgttaataatattattaatatttaaaaaaattttattcattagagtacaaaatataaataatgacctatttaggggaataagtcattatttacacctttgttagcatttatataattattaattatggggagaaataataatgattaaattactatctcaaatataatatatatcattattgtgtcaatagtatgtcaaatatgaaataatgcccagttttgaaacctactaagtattaacttgaaacacttcaaatatatggtatagtagtttatagaatatataaaattagtgagagtgagataaattatggagtggattgatgcagtaaaggattataatccttgtaatgagcaggaaatgaaggataaggaaattatattaaagtattctagcatatttgatgatattttaactagagataatgaaattatacatatgacaagttcagcatttgtgattaataaagctagaagcaaggttttaatggttcatcataatatatataattcatgggcatggactggtggccatgctgatggagaaaaagatttattgtctgttgctattaaagaagcaggagaggagacgggggtaaaaaatttaatacctgttaataatgaaatagcatcaatagatattttacctgtttttggacatgtaaaaaaaggaaaatttgtttctccgcatttacatgcttctctagcatatattattgaagctgatgaaactgagaagcttattgttaagccagatgaaaatagtgctgttaaatggatacctattgatgaaataaatttattttctaatgaacaacatatgaaaaaagtttatgataaaatagtttttaagataaagaatttatagttattgagatatgcatggaaatgccttcggcacataaatttgataggataataataccgataaatatttacataatattttattgtaatgaaaaaatagaattgtgaatgagaatttgattataagctataaacttaattacagtaagtttgattatgtaaggagaaatagatatgagatatgtaatagtttctgtagtacacggtgaagcaggagattttaataataatttaagaaaagaactttttagaaattttaaagcaaaatcatctaaacttcctgcacattttacaattaaggcaccttttgaatatgatgatggaattacagagttaaataatgttctcgatgaatttattaaagtggaaaaagcagagccatttacaattgatggatatgatcattttaatgatagggtaatttttatgaaggtaaatatgtctaaggaggcaaaagaagctcatgatagactaatcgataaaatgaatgagataccatatattaaatttgataaaaaagatggtaaaaataaaactttccatgtgaccttggcatcaaagaatttaaaatttatttatgataaagtttgggattacattcatcgatataattgcgagtttaagtgtagcttcgataatataactatttataaatgggaagaaggaacttggaaattatataaggaatttagattaagttaatttaactacaattgaaggatatacagataaaaaactattttgttgtttaactatttaaaaggatagatagacaacaaaatagttttttattttttaaaataatatttatacggtcatatttttcgttgagtgcatgtttaaaactaaaagtcttgaagatattaatgcagtgataggaatgataagaataatacctatgccacagcttaaaacttgaaatacttcagagcaaaaaactttttcatttataatagtagagatagggtaattaagttcattaaaatatattattaatgtcataaatccgcttatgtatgcaaagagaagggtattagtcatagttcctaagatatctttgccaatattcattccagatttaaataagctattcttacttgacataggatcattcttataaatttcattcattgatgatgatattgatatagatgcatctataattgctcccaataatccgattagaatttcacatattacaatttttgaaaagttcaattgaacatatagagataggaatgcaacagtttcagcctgttcattgctaaaaccctgtatttgggcattcatactcatattatatgttataaacataactaggaaaataactattataacagataataaagaagaaaatgtttttttattaaatccattaataaaaaataagctaaaaaagctaatgaaaattgcacaaacaaaagtaactttaataggatcaatttttgcaccaattagaataagcataaagaaaaaagtaaagaaatttaagattaaagtaaaaaatgatttaattcctcttgtgcctccaacaattgtcataaggataaataaaataattaataatattagtattatattcatgatcttaaacttctccaatcttatgtttttttagaatagcaatagatgtaaaaattgttatcggaatacttaaaactattccgatgcttccaataagcgctctcataaattctagagaaagatttatatttataatataagttataggtaacccgtttctaagcagaagtaatattattggcatactaccgcttagataagcaaaaactaatgtatttgacattgttcccataatatcttgtccaatttctcgagcagatttaattatggacttactatcaatattaggatttttatcataaagctcatctatggcagaagatatagaaattgcaatatccattattccacctagtgtacctataataagttcaatgaaaaatatcttttctggaggatgagttagaaactccatttcttcaaagtgaattccactccaattatttaactttattacaataccagctattagcattgatgttaaagtacctgctaaagttccaattatagcggaagctgtttttttattttttcctgatactataaataaggaagcaattataaaaagtatacttcctattatagaaagtatagctaagtcataacctttggaaaatagaccaattattgaaaatacaattaaaatattaacaacaacacttactaaagatttaaaaccttttattcctccaacaagtaatatcaaagctataaaaatgtttatcatataaataacatatttgtccctctttagatctagaattttcgcagaagttatttcattattatcgctattttgcagagatataaaaatttcatcatttacttttaaatctaagtcgttaacttgagaaaatgatgttgtattattaagttcaatggaatttcctttaaacgtaccattcataataatagcttcaattttttgatttttcataggttctatttttccagtagaattttcttctttggattcattttcggttattgatgttattttagctattggatttccgtataaattttcattagtagaaataaaaaacaaactagctaaagatacaacaattaaaattaatataattaaaacagtctttttattaggttgtttacctatatttgcatctaattcaaataagtacttatttaataaattcttagtcatacacctgtagctcccttacaatacataattataacaaattgtaaatttacattctaaaaaattatactcttataaagttgtgtaatcaatcatattatgattaaaaatgtaaagttactaattatttgattttacataataagataaggaattatggaatttttttattcttgtaacatttttgactaaattctgtgacaaaactgtaaaaattatcttatataatttaagaaaacataagttaatacaaaaataattggactatagaataacatatttgaaaggatgtaatttaaatgaaaaataaaagtattaagagtaaagttatgacaggcgttattttagcgagtatggtgatatctgcaagtacaggagtatttgcggcagattcattaaatgtttcaaacaataagtcagcagttcaacatcaaggtagagagaatggtttccaaacaaaattagattctttagtagcagcaggatcgataacttcagatcaagaaactgctataaaagaagcattaataccacaaggcggatttaaaaatggaaaacataaggatttctttaaaactaaattatcagatttagtgacagctggaacaataacagcagatgaacagacagcaatagaaacagcacttgaaaatactaaaggaaactttaaaacagttttagataatctagtaacaaatgggacattaacttcagacaaagaaacagcaatagagaatgctttaaagccagaagctaaaaatggaggacataaagatttctttaagattaaactatcagatttagtgacagctggaacaataacagcagatgaacagacagcaatagaaacagcacttgaaaatactaaaggaaactttaaaacagttttagataatctagtgacaaacggaacattaacttcagacaaagagacagcaatagaaaattcattaaagtcagaagataaaaatggaggacataaagatttctttaagactagattatcagatttagtaacatctggaataataacagcagatgatcagacagcaatagaaacagcatttaaagatgcaaaaggaaatttcaaaacagttttagataatttggtaacagctggaacattaacttcagacaaagaaacagcaatagagaatgcgttaaagccacaagtaaagcaattaggagaaaaagataaatctaaaggaattgaaaaacataaagagatgataaagactaaattagatggactagtaacagcaggaacaataacaactgatcaagaaacaactataatagaagctcttacaccttctaaataaagttgaattaatattaatatgttataatatttaacaaatatcgtatacggttataaaaaataataattaaagaagggagtatcgcaaaatggttatattttaatcatgaacgatgctccttttcgttcacgacttgacttgttagaatcctaaatgaaaaagtgtcatttaaatatggagtataaataaatagtattaaaatattgaataataatactatttattgtataattattcatataataaaaaatatatggattaaataaaaaattattacgtaaatttaagttatatattgtttatacatagataaacaatttaagaattagacttattagatgaacatatttacaaagttgctaaaactttaagctcatatcttcacaagaaattataaatatatttgtgaagaaaacatttgaaaatgagctgttaaaggttcttagctgtaggttgttccattttagcttgtcaaactgaaagttggagcatgctaaagtggctacaacctgctgcttagaaccttcatcgatattttcatagcttttcggaatcaaaatatttatggtttcggtaagttatcacataagtctagttttaaagttggacatctatattatgtataaacttatttacagtatatatactaaataaaatggattttttatttataaaaatattataaatagaaggagaatgagcatggcagtaaatttaaggggaagaagttttttaaagttattagattttaaaccagaagagattagatatttgttagatttgtctaaggaattaaaaacattaaaaagaactggaattttacatgataagctgaaaggtaagaacatagtattattatttgagaagacatctacaagaacaagatgttcatttgaagtggctggaagagatttaggaatgggggttacatacctagattcagcaggatctcaaatggggaaaaaagaaagtatagcagatacagcaagagttcttgggagaatgtatgatggaatagagtatagaggttttagtcaggaaatagttgaagaattggctaagtatgcaggagttccagtatggaatggattaactgatgaatttcatccaactcaaatgattgcagaccttctaacaatagaagaaaaacttggaagattaaaaggcgttaattttgtatatatgggtgatgcaagaaataatatgggaaactctctcatggtagcttgtgcaaagatgggcttaaatttcactgcttgtgcacctaaagagttatttccatccgaaaagttagtggaaaaatgcaaggaaatagctaaggaagttggaggtacgataactttaacagaagatgttaataaaggaactaaaaatgcagatgtgatctatactgatgtatgggtatcaatgggtgaaccagatgaagtttgggaaagtagactaaaattgttgagcccatatcaagtaaacaaagatgttatgaataatgcaaatgaaaacgcaatatttatgcattgtttaccggcttaccatgatctaaaaactaaggtaggaaaagatgtaggagaaaaatttggcatgactgcattggaagttactgatgaagtattcgaaggaaaacaatctgtggtatttgacgaagcagaaaatagaatgcattctataaaagcgataatgttagcaacaattggtgcataaattaaccagagttaatgagaagtagaagacctttttcataagaaaaatgataatgtattatttttcttatggataaggttttttatttatgtctaggaaagtataaaaattccgaacgctgaaagcgacttgtagacttgtattgagaagctatatgtggtaaattgatgaaatgattaagagtaaattaagaagaatattagaagaaaattggaacgaattttataaaaaatatagaaatagaataagacctaatgtcattgcagaaataaaaaaagttatgaaatgcaaagatataaataatggctatattgaattaaaatgtcatgattgtggtgaaataaagaaagttggttttacatgtaaaagtagattctgtacatcatgcggtaagatttatgttgataattgggttaacggaatgctaggaaaattaataaatgtaaagcataggcacatggtgtttacaattccggaggagcttagaaattattttggaagagaaagagatagattgaggttacttccgcaatgtgcagctaaagctgttacgagttggatgagtgatcaaaataaaaaagaagaatttatccctggaattatatcagtgatacatacttttggccgggatttaaagtggaatcctcatgtacatatgatggttacagaaggtggaaagggaaaagtaacgatatggagaaattttaaatatttctcatatgaagcattacgaaagagatggcaaaaaatattactagatgcaataataaaaagagaaggaaataaagatagttttagacgattaaagaacaagatatataaaaataataaagaaggattttatgttcatgctaaaaatgaaataaaatcggcaaagatagcagcaaaatatatagggagatatgttggccgtcctgcgatagcagaatcaagaatacttgcgtatgatggtaaaagagtaacctttaaatataaaagacacgaggataacaaagaagtaatagaaaaagtgcccgtgtttgagtttataaaaaaagtcataatacatataccagacaaaaactttaaaatggtgagatactttgggctatattcaaggagaagtaaggataaagatcaatttattaagatgatagataaaaaaatagtacaaattaaaaaatccatagaaaggtgggaatataggattcttgcctcttttggtgtagatccgtgtaaatgtcctaaatgtggaagtaaaatgaaatttaacgatatagtgtatccacgatacggctcgatgcgagaatattttaaaaagaaatttataaatgaaggtaaagaaaagttagaaaacattctggaaatatatgcaattgcaaaaggagttctatatggtaaaataaagccgacaacaacatagttggagggatactaagtgaaagacattgtatcatataaatgtttaaaatgtggaataacagaaaatatacctagggaggttgtagaatactttgatgagatggatcaaagtaacatagatgaaccgccttgtttttcatgcgaaaaatgtggcggtactatgagaccaaaagaatacgatggggtatatgggaaaaaatataagttgtgataagagaaccatagagaaaatgcaatctctatggtttttgctttaattattaaaaatttctccgaaggagcgtggcgcagccactttgttcttctataggaaattatattattggacaatctgtggataactaataaaatatagatattatgatgaaagagaaaataacagtaagagatatattaaatgataactataatgattttaaaaataaatattggaataaggtaccgaaagatatgcgaaagcatattgatgaagccgtaagtaaggctttaaagtgtagtgatattaaatatggttttgcagaatataaatgtgaaacatgtggagaaagtacaaaagttccgtttacatgtaaaagtaaattttgtaatagatgcggtagattgtatacaatgaaatgggctgaaaaacaaagacaaaacatgctaagagttgtacatcgacacagtgtatttacactaccgaaggaactaagaaattatttttattccaagagagaattattaaaggaattacaagatggtgtaaatgaggtaattaagtattggtacaataaaaagaaaggctcgaactatgaagttggagtgattgcagtaattcatacttttggcggagatttaaaatggaatccgcatgtgcacgctttagtaactgaaggtgcagttgataaaaaaacaaagtggtggaagcaagttgagtatattccatatccatatttgaaaaaatcatggcagaaagttctattagaaataataaaaaagcatttcaattcttataagacaagacaattaataagttatctatacaaaaaatacccgaaaggtttctatgtgaatgctaaaagaaaattagatgatacaagacaagctataaaatatataggcagataccttgcccgagctgcgatagcagagtataggataattaaatatgaaagtaatagagtgaaattttggtatgaagatcataatgatggtcttaaaaaagttattgagtgcgatgctttgcaattcataggaaaaataacacaacatataacacctaaaggatttaggatggtgcgaagatatggtgtttattcaagaataaacaataaactagcaaaacatattgttcatctttataattttgtgaaacaaagaaatattgatgaattattaaaagaaaagaataaacaaaatgaaattaagaaatcatggaaacaaagaataatagagagttttgaaagaaatccattattatgtagtaaatgtggaactgaaaaatttttatggaaaatatggcataaggaatatggggtgatatatgatataagggagacgagtaacagaaaggatatattatatgaacccaaaagagataaagtacatagaaaagttttacaaatatcattgttataaatgtaattacagtgaattcgctcccgcggacatcgtagatgagtttgctgatatggatgaatattgtgatggagaatacagttcagaacaagaatgtaaaaggaagggaatgccagtaatggagtgccctaattgtaatgcggatttttattattcaggagaaaagaaaacggaagaaggttcatattgggttgatgaagatgagccctttccattttaaaattcacaaaactcatagtccccgctaggggatttttttattttatcgtattaaaagttatgactaaatttggtaaaaatcacaaagaatgatgtaacatctttttttcatattagaatatgagataatagataaatggaataattgatgtaattatttgacgtaagggggaaatggcaaaatgagtggtaagataaaagatatgacagaaggaaaaccttcaaagcttatttttatttttgcattgccattgatatttggtaatatatttcagcaactatatacaatcgtggatactatagttataggtaagtttataggtgttgaagccttagcagctgtaggttcaggcgcgtggcttaattggatggtaatagatatgataattggttttacacagggcttttctatactgatttcacaatattttggggaaaataacataaaaaaattgcgtaaaactgttacaatggctataatacttgcaattattctaggaattcttatgacaacaatatcattacttgctgttagacctatattgataatgctaaatactccagaaaatattattaacgattcactttcttttctactagttgctttttgtggaatacctgcaattttagcatataatacgtgttcagccatattaagagctttaggaaacagtcgtacaccacttattgctatggttatagcatcagcaattaatgtattattagatattttgtttgtagttgtattcaagtggggaattaagggacctgctatagcaactgtaatagcacaaatattttcgtttttatattgtgtaaatagtgtgcggaaattatcaatactaaaaattactgctgaagattttaaaatcgatatgtttatgataaaaaaattaatttttttaggtactcctatatcatttcaaaatggaatcataggatttggtggtcttgttgttcaatacgttataaacggttttggatttatatttgtagcaggatttacagcgacaaataaactttatggaatactggaattagtagcagttgcattaggctatgcaatgtccacattcacaggtcaaaatttaggagcaaaaaaatatgaccgtatacgtaaaggaatgaattcagctttaaagatgactgttggaacgtccattgctctttctctaattatatttttctttggacgttattttgtaatgatgtttatatctggaagtccagcagaagttgagttagtaacagatgtggcacataaatatttgaaggtcatgagtagtatgttatttatattatatatgcttcatatttatagaaatgcattgcaaggaatgggcgacactattataccaatgatttctggaatcgttgaactctgcatgcgcatttcagtagcactctttttgccattattaataggagaaacaggaatttactttgcagaagtggccgcttggcttggagctgaattgattttgatgattgcatattatataagaataaaaaaactcggtggtgaagacttagaaaaaaacttagaatgttaagaaacatacaacttaattatacaaaaattatgcactaaattagagagagagagttttctatagtaactctctctaattaattttaatctatttctaaataataaaagattactcatgaaatgttaaaattttatttgaaccaaacatcttcatattctttatgcaaaacaaattcctcttctgcaaaccaacattgtggtattatctttttgttatgttgtctagcaaaatccacgacccttttaactagttgctgaccgatatttttccctctaagttctggtgatacaaaagtatgatcaagtataatattattttctccactatctatatatgttactacagcttttatattatcttcgttatccccgatgtaaaatttatgattaccttccttaatttcaaccaaaataattctcctttctatttctaagtaaagttcaaatttatttattaaaactattatactttaatagtttatccaaaagctaaaaataatccacaaaatttaaacattaaagattttatttatatctatatgtcaagtcaattaattaatatagaaactcagaatacatatttcaaattaaagagtgagttatattatttagtaaaaaatctattaaatgttaaactatgttaaaaaaatatcaattatatgactaaaatttaataaagacattgaagttaaatgtgtatttcttacacagtaaagatagtcaattgctaattaatgtttaagtaataacttatttaaacattaatcagcaatttgaatgttaaagaattaacggcttaaaaatgttaatttaaaaactattctttaaattaaaaatataaaggtttataataaaacaaataccaaataattcattaattaataaggtattacattttatgtattatattgaatgttatgaaaacgtatatttgtgaggtgatctatttatgctatattttttaactggatgaaagttagtagaaacgtattcgtgtaatgagttatagcaattttaaggagtttgataacgatgaaaacagaacaaggcctagtaattgaggtggttggaaattccgcaagaattaaagttggtagacatagtgattgcaaaaactgtggtgcttgcccgggaagcgaaagcctaatcttagaagctaataataaaataggagcaaagccagggcaaagagtaattcttgaaataaaagaaaccaatgttctgagagcagcttttattgtatttattctgccgttaattgctttatttattggtgtgatgttaggaggttttataggtcaatatataggagttaataaatttatgttccaagtgattggtggggtagttatatttgctttatctattgttattgtaaaacatttcgataaggcaagtgctgcaaatgaaaagtccaagccagtaattattcgcattttatgatagatttatttctcgatatttaaataaaaaattgatgaactattatttattcaagtatatattactcatattgtaaatattatttacttgtattataaatattatcttacgaattattgtagttatgtaaatttaattgtaaataatttattcttaagaggtttgtgaggcgattattaatgttaaaaagttttctcggaggaattcatccgaaggacagtaaaaagtatacttctgataaagccattgagttaccaccattacctgaaacagtaactattcctatgagccaacatattggagcaccatgtacacctatagttaaagttggagatatagtaaaaaaaggacaggtcatagcaactagtgaagcatttatgcatagtccaatacatgcatcaatatcaggaaaagttacaagtattgcagaaatgccacatacatcgttagtaaaatgcttatcagttgttattaaaagtgatggattagacgaatgggccgatggaataccattagaacgtgattgggaaaagcttgagaagaaagaagttcttgacattataaaaaatgctggaatagttggaatgggtggtgctacattccctacacacgttaaactttctccaaacaaggaagttgatacatttatcgtaaatgctgctgaatgtgagccatacttgacagcagactatagaatgatgattgaatatgctgaccgtatagtaactggagttaagatagttatgaaaacactaggggttagcaaaggaattataggaatagaagataataaaccagaagcagtaaaagttatgaaagaagcctttaagggtacgtcagttgacattgtagctctacctacaaagtatcctcaaggcgcagaaaagatgcttataaaagtacttacaagtcgagaagttccatcgggtggattgcctatggatgttggagttgttgtacaaaatgttggtacagttatagctatttatgatgcagtagtaagtggcattccaataattcaaagagtaactactgtttcaggagatgcaattaaggaacctaaaaatctattactaagaataggaacaagttttaaagaagccataagttattgtggtggatttagcaaaactccagaaaagttaattatgggagggcctatgatgggaatggctcaattttcattagatgttcctgtaattaaaggtgtatctggaattctagcattaagtaaagatgcaataaattctggtgaggagtccccttgtataagatgtggaagatgtgttgaggcatgtcctatgggtctaatcccaagtatgctaagcatattaggtgaacgtcataaatttaaagaggccaaagaggaatataatttgctaaattgtattgaatgtggaagttgtgtttatacatgtcctgcaaaacgtaacatagttcagtatataaaatattcaaaatcacaaaatttagcaatggcgcaaaaaaagtaaaggaagaaggggtaaaatgagttccgaaattggagtacaagaaagtaaagtgcaaggaattaaagcaaaagaagctgatacacaagaaaatagttttactgtatcagcatctccacatattcgttgtgatgaatcaatctcaaagataatgtggaatgtaaacatagcattagcaccagctgctattttttctatatattattttggtatccctgcattaataaacttagttgttggtgcagcttcagcagttgcttttgaatatttggttcaaaaattccgcaaaaagaagatcacagcatttgatggaagtgcatttttaactggcttattgctagctatgtgtgtgtctccaacgttacctgtttatatgataatagcgggttcgtttgtagccattgtaatagccaagcattctatgggcgggcttggatataatatttttaatccggctcatattggaagagcagcattaatggtatcttggccagttgcaatgacaacatggacaaagatgacaacttcagtagatgttgttagctctgctacaccattgaacatattaaaacaacaaggatattctaaattgattgaaacttttggtggcaatacagaattgtataaagctatgtttattggaacaagaaatggaagtgcaggagaaacttcaacaatacttcttataattggaggtatttatcttatatataagggatatataaagtggcaagttcctgtatgcatgataggaacagtaggaataataacttggatttttggaccttcaggtttatttagtggtgatcctattttccatatgatggctggaggattaattataggtgcattttttatggcaacagatatggttacagcacctataactttaaaagggcaaataatttttgctgtaggagctggagtaataacgtcattaattagattaataggtggttatccagaaggcgtttgctattcgcttttacttatgaatgctgtaacaccactaatagatcgttttgtaaagccaaaacaatttggagcaagggggtagtaaaatgtccaatgaacatgctattaataaggagtattctatttttcagatagcaataaatttaataataacttgcttggcatctggtttaataataggactagtatattatgttacggcaccaattgcatctgaaaagagagaaatatcaaaacaagaatctatgagagcattagttagtgatgccgatagcttcaaggctgtcccagataaggcagattggtttacagccgaaaaaggcggtaaagtaattgcatatgtagttccaggagaaagcagaggatatggtggagaaattaaaatgcttgtagctattacaccagctggagaagtaatagattataagatactagcacataatgaaactccaggtctaggagataatgcttcaaaagaaccttttagaagtcaatttaaaggaaaaaaagaagcaaatttaacagttacaaaagatgcttctgataaagatgatattcaagctatgacaggcgcaactatttcatctagagctgtaacattagctgtcaaaaatgctgtgcatgaagtaacagagtttgcaggaggtaaataatatgaaggaaaagtggaaaatttttagtaagggtttgtatgatgaaaatccaatatttatgttatgcttaagtctttgtcctgcattagctgttacatcatcagttatcaatggtttaactatgggcttatgtgtaaccttcgttattacaagcaataacgtagttgtatcgcttacaagaaaatttgtaaacccaaaggttagagtaccagtttatattacatttatagctactatagttactgttgtagaacttgcattgcaggcaatatcacctgaattatatagtgctcttggcatttatttagacttagtagttgtttttgctataatacttgcaagagcagaggtattcgcatcaaaaaataaagtgtttccatcattcttagatggatttggaatgggatgtggttttacattagctatgctttcaatatctgtaataagagagcttttaggaagtggatcaattcttgggtttaaaatactaggctcatggtacaacgcacctttaattatgatactaccagctggtgcatttatactaataggttacatgataggagcaataaagctccacaatgcacataaagaagctaaaaaaatagaaggaagtgaagcataatgagagagtattttacattgtttataggtgcgttacttgtaaataattttgttttaacaaaatttgttgggctttgtatattttttggagtttctaaaagtttagatgcatcaataggcatgggaatggcggttacctctgttataactctaagttcaatgttagcatgggttgtatataattttgtacttttgccatatcatttgacattcttaacaactattgttttcgtaatacttatagcaagttttgtgcaattattagaattaattataaagaaacaagcacctacattatacagcatgtggggaatatatcttcttttaatagcaacaaactgtattgtattatcagttccattattaagtgttgagtcaaattactcgtttgtaaaaagtgtagtgttctcaattggatcaggaatgggatttgcactggccttagtacttatggcaagtttaagagaaaagctggtttatgcagatgtgccaaaaccactagaaggaacaggagttgcttttatattagcaggtatgttggcattggcattcttgggattttcaggaatgatataaaggagatgagtaaagattatgtttactgttataatggttttagtggtccttggaggaataggtgcggtttttggttttatcttagcatttgcaaatagaaaatttgctatggaggtgaatccactaattcatgaagtagaagatattcttcctaaaggacaatgtggtgcatgcggctatgcaggatgtgcagcatatgcagaagcagtagttatgaaagatgatgttcctcctaatttatgcgttccaggaaaggatgctgtagcaaaacttgtagcagaaattacaggtaaaaaagcagaagaagtggaaccaagaatagctcatgttagatgcaaaggaacaagtgaaaaagctgcattaagttataaatacaaaggagttcatgattgtaaggcagcaagcctaatacaaggaggaccaaaaggatgtaagcatggatgcattggatttgggacttgcgtaagcagttgtccttttggagctatgacaatgggagaaaatggacttccagttgtgaatagaaaaaaatgtactggttgtggtaagtgtgaagaatcatgtcctaaaaatgtcattcaaatgatatcaattaatgctagagtaaaagttgattgtaattcaaaagataagggagctatcgctagaaagttatgtagtgctgcttgtataggctgtggactttgtgcaaagaattgcagctatggagctattcaagttcaaaataatctcgcagtggtagatcagaaaatatgtgctgaaaaatgtagtgaagcaacatgtttggcaaaatgcccaacaggagcaataaaagttgcgaatgaattaattgctaataaaaattcagacacagtaaaagtgacaatttaaaatttacagtattctatattaaattaaggtttaatataaaatatttattaaatgtatagccagtagaaataaaaaaatgcatatttctgctggctatacattttgtaattagtggggtattgtagtaaacgtatgagaaaatttttattattaatgaaagtgataaaattcattgactaatatttaaatcattaaagaaaggaagcttggacatatgcttgactataaaattagaagttataccaataaaaatacctgtaccaattccggctatagataaaattggtaaataaagtgtaactgcaatattttgaactataattgcagctacaattaattgtcctacgttgtggaaaaatgctccagcagcacttacacctattatactaactttatctttcccaatactttttacgaaaatcattgcataataactaagcaaggctccaactgcaccatacataagagtagagagatttccaccaaacatagttgaaagaagaagccttaatattataattaaaaaaacatcttttttattattcaatatgtataaggctatgacagtaattaaattagttaaaccaagttttgcaccaggtgcaataaatggaacaggaatcatactttcaattgtatacaaagccaaagcttgtgatactagaatacctataaatactatacgaaaagttttattcatttaaacacctcaaactgtttgccattatatcactgctttttatttcaatcataagtttatgtggaaggcaaactataatctggcctggctctgatataaagccagatctaacgcatattttatccttgcaatctgcatctattactttaatagatttatctttgacgtctattatattatcaccgtatgaagttttaatatctatttggtcctcacctctatgctcagataagttgatttttttataaaatttaccgtctatagttatttcagcatatgttccattgtaatgtttgcccattattaccccaaaaacaagttcaggaataagtgatatacatagtagaataactattataattatatcccattttttaaacatattgtttccttctttaatctataaatttattatacatttttgccaaaaattctaaaatatattatggttaatattgtatattaagttaatttttaaatcaagaaattaattatataagttttaaataatataacatatatttagtattaaaaatattcacaaagcttgtaatttactaactactgctataaaataataaacaagattgtgaacacgtgtgtaatcattgagcgtaaaagaaattatttataatatctagctagatttgagtactaaagagtaatacgttgcttagagataaaagcgctttatttattaagattttggaggattaatatggctactactattaaagatatagcaaaagcattaggaatatcacattcaactgtttcaagggtactgactggatctaaatctgtaaatgaaaagaccaaagaggcagtactcaatgcagttaaggagctaaactatattcctaatatgagtgcgaggagtttaaagatagataaagcttataatattggtgtatttttttcaactataagtaatggaacctcaccatttgtatttcaaactgttataaataatgtgtacaagaatatagacaaaaagtataatgtcattgttaaaggaatagatatgtatgaaaaaaatactataaatcctaaaaattatgatggaatactagtagtaagtcaaaaaatagatgatgatgattttattagggaaatattagagaaagagatacctactgtagtcataaatagaaaggtaaatcatgatgttataaatgtatatacagatgagagtgttggggtgtataagggagtagaggaattgataaaaaagggccataaggatattgcaataatagaaggagcaatgaatttcgattcaactaaaatgaggcgagagggatacttaaaagcttttaataactataatattacattagataaaaatctggtattaaatgggaattttactgtcaaaagtgggtatgaaaaagctaatgaattaatagaaatgactgaaaagttttcagccatatttgcttttaatgatgagatggcaaccggggcaattaaagctattacagagcatggattaaaggtcccagaagatatttcaatactaggatttgatgggaatgaaattggcagatttattactccaagtattacaacgattaaaaggcctataggagaaatagcaagagttgccactgatttacttttgagattgctaaataatgaacaagatataacaactaagaaaatatatatagaatcagaattggaactaggtaattcaattaaagatttaaattaggataaattatataaagctatagttaaggaaaacttttgattcactatagctttaaaatttaatgtaaaatgagaacaaaaaaactattgcaaatatttacataagcgtatatacttgtattaagaaatgaggaacacgtgtgcaaagaagattatataatattaaggttaggaactttagtaaagccttcttgataaaatgtatatataaactttgaatattttttactcaactaggaacacgtgtgcttaaatgtaaggagagaatattatgaaaatggaaatcagatactcaaatcatccagaagactctaaacgctatgatacagaaactttaagaaaacactatttagttgagaaagtatttgtagatggagaagtgaatttagtttatagccataatgatagaatcatatttggaggaattacaccagtaaaagaaatattaaagcttggagcttctaaagaattaggaacaggttactttttggaaagaagagaacttggagttattaatgtaggtggagaaggaacaattatagcagatggagtagaatataatctaaattatagagatggattatatgttggacaaggaactaaaaatatagaatttaaatcggctgatggcaaaaatccagctaagttttatataaattctgcaccagcacttaaatcatatccaacagtaaaaatagatttagaaaaagctaataagataaaatgtggcgatgaaataaacatgaataaaagaacaataaaccaatatattcatcctgcagtatgcgaaagctgtcaattagtaatgggattaacaatacttgagccaggaagtggatggaatacaatgccatgtcatactcatgaaagacgtatggaagtatatttatatcttgatgtacctgaagatcaagcagtaattcattttatgggtgaaggacaagaaacaaggcatatagtaatgaagaatgagcaggcagtaatttcaccaagctggtcaattcattcaggcattggaactcagaattattcatttatatggggaatgtgtggagagaatataacattcgatgatatggataacataagaatccaagatttaaaataatcaaaagaataagtttctgcatactaatttctaacttatagtgataatcatatagtttcaaaatgctatagcgcaagcaaatgcacaatttgaaccagttgcagcttcagctacagcaattatagctacaagtatattagtgacatcaatattaactcctattgtaactatgtggtttgaaaaaagagcacgggctaaaggactaccaattaagccatctaagtataataaaaacataaaagctgagagtagtttaagtgaaatttctgtataaaatatgttaaataaatttatttaaagctgtaggcatatatttggcctgcagctttttatgatgcattttaaagtatttaatctagaaaaattacatatattgtaataataagcctgaatttaaaattttagtgagataaatgctcattaagagaaaacatagaagtttatttgcagcatatatatttcaattaagtaacctataatttatcagagtgaagataggcagctaaagaattgaaatgattcagtataaatggtaaaatatatattaatatcattatctaccattgattttatattagtgaaaaagatcttaaattagaaaacgtacaaattaaataatcaaggagcattgctatgaagcttacttttagattaaaattattcttttattttgtaggaattatattgtctatatctattccaattgcgctaataacttataattatatgtataaatcccttaaagaggatttattttcaagcgctaaagcccaaatggtgcaggttgataacaacttttctaacatgttagggcaaataaagtacaatgctaagtttcttgcaacttattcagatgcaaaaaaagcagaccagtctatttcagctctatttaatattcctgatattgcgataaataaaaaatactcaaaacaaatacctgggatagagagtaccatatataatgtgctcgaggcttatggaacatctcatccagaaacaacttatgtgtacattggtactaaatggggagggtatattcaatggcctgatggattaagtactaacacatttgatccaaggacaagaccatggtattccttggcattatcaaatccagatgaagtggtaatttcagatccttacgtttcagcagttgataattcccaaaatgtaattataagtgcttcaacaacagtaaaaaatgaagatggaagcattgttggagttatgggaatagatttaagtttggaaaagttatctgaaataataagaaatattaggattggagatacaggttatgtttttctttatttaaaggatggaacgatgttagctcacccagatatagatctaaactttaaaaatatcttacatttaaatcagttaggttatacatattctcaaacaaatgaagcttcaaaattttcatttgataactatgataaatttatagatttggataatggaagttttgaaacttatataaatggaaatcctgttttagttaatgtttatacatgtaaggatactggttggaagatggcttcagttataccaaaaagtgaattggaaagcaaagctagtaagatgggatatttaataattatgataacagtgggtgttttgtttcttgctattttcgttactctcattgttactaagaaagtaacaaaaccaattacagaattagttcctttaatgcaagcggctggaaatggggatttatcagtaaaagctagtattaattcaaatgacgagtttggaaaattaggaagatctttcaacttgatgattggtaagttatgttcaagctatgaggaattatcatcagtttatgaggaattgctagcgacagaagaagaattaagagtacaatataaggaattacaacaaaatgaggaagcacttagaatgagtgaagaaaaatacaaacttgcactagaatgtgcaaatgattcgatttgggaatgggatttagttacagatacattctttgcttctgataaattaattgatatcactggatataagttggatgatataaataatctaagaaactttgtgtatgagaatgttcattcagatgatcttgataaagtgaaaaaagattttaaaaatcatattaatcagcttacagatgtttatagctctgaatttagaataagaactaagagcagttcgtacgtttggattctctcttgtggtaaagcgttaagagattctgaaggaaaagctataaaaataactggttctattagagatatttctgaaagaaagatttcagaggatagaataaaattcatggcgttttatgattctttaacaaaacttcctaacaggacattgtttatgaatagattaaatgaacaactacaattatctaactatgccaataaacaaggcattgtattttttatagacctagataattttaagaatataaatgatactatgggacacgagtatggagataaattattaatgagtttagcaaaacagtttgaaaatttaattgaagaaaaagatacaatatctagacttggtggggatgaatttatattacttcatcctgattcaaaagaagatgaaatacaaacttatgcaaataagttattaagtgtgttcgataaagtatttaaaattgataacaagcatatgtatataactgctagtgttggaatagctatatatcctaaagatggaagggacagtagtacaattttaagaaatgcagatgctgctatgtacagggcaaaggaattaggtaaaaatagattttctctttttgatccacaaatgtatctaagccttcaacgaaagactagcatagaaagaatattaagaacagcagttgataataatgagcttattattaactatcaacctcagtatgatttacaggcaaataaaatctttggttttgaagcattacttagattaaatagtagggaacttggttttgtatctcctgcagagtttattccaatagcagaggaatgtggatatatcacacaattaactttatgggtgctcaaagaatcttgcagacaaagtgctaagtggtttgaagcgggttataaatttaatagcataagcgttaacatctcatcagttgatttacaagagataaatttcttaaataatgttaaagaaattattgaaagttcatctgtcaatccgaatatgattgaacttgagattactgaaactgttcttatgaaatcctttgattctagtattgaaatattaaagaaattaatggacatgggaattagaattgctcttgatgactttggcacgggatattcatcactaagctatcttagacgaattcctataactacattaaagattgataaatcatttatagacaatatttcttcaaataagaaagaagaatccattattaaaaatattattcaaatggcacatagcatggaattaaaagttattgctgaaggcgttgagactgaagatcagctttcgatacttaaaagaatgaaatgtgattatattcaagggtattattttagcaaacctcttccagctaatcaacttgaagaattactggaaaaatagagaattgaatgagtatgcttagatttaaggtgttaagatataaggggcgcatataagaagattactataaatgaattagtattattcctttatcacataatattaataagtatacagaaataaatatttcaaaagagaacagggaggaaacaaatgagtcaaaagtatgtaaaaaaatccaatgaagaattaaagatgagtctgacagatgaacaatatagaattacacaagaaaatggtacagaagttccattttctaatgaatatgataatttgtttgaaaatggaatttatgtagatgtaactacaggtgagccattgtttgtatcaaccgataaatttaactctggatgtggctggcctgcattttcaaagccaatagatagaaaggtaataaaagaaaaaatagataaaagtcatggtatggtaagaacggaggttcgaagcagcactggtgatgcacatctagggcacgtatttacagatgggcctgaaaatatgggaggattaagatactgtataaactcagcagcacttaagtttattccaaaagacaagatgaaggaagaaggttatgaagaatatttagataagatactataatagtagcattatcatcatgatattaattataagaactttaaaataataaataaagctaatattttttaacggcggtaaatatatcgccgttaaaatttaatcaaaaattgaattatatttctatcttttctgaatcttctaatataatcaaatcttctgggtaaggattaaaataagtttgttccaaaaggtaatctatattaaatcttactacatacgatttaactaagagcataggagtcattattgtaagttttttcatcttgtatttctctaaggaatccactaataattgtgtttcttcactagttatgtattttgaaaaatatcccatggcatgcattagaacatttatattatttgtatacttaggaagtttttcgaaagccaaattcaaattcttctcatattcagccataatactttttatatcactattttcaccgtttgcagtaattctacctaagattttagtatacttttgactatttgacatgagcagtaatttatttctgcgttgaaaatgtattaattcattaagtgaattagattccttgacttttctaaaatctgcattaataaaaattcttgtaagaaaattatctcgaattctataattatgtaatctgccttcatcttctattgctgcataaggaaatttctctttaaccttatttccaaatattccagcacctcttgtgcttcctgtaaccttagctgtgccattataaatttttacatttttatgaccacaggaaggtgaaccgctttttaagagaaaaccatctatattatttaaatctttcaaatatgattctgaaaagtcaaccatttcttttgtgaattcttttccttctttcggttcatataatttcaattcattattttcagaaacaactctaattgtgtgacgtggaactttaagtcctatagaagtttctggacaaacatttataatattaacaaaaggttttaatttttcaacaaatgcatcagttatcatttgaccattgtaacgacaggcttcgaaacctaaacatttactaaaaaagacatttggttttaaaaaatcacccatgaaaacactccttttttcaatttacttataatattatcattttatgagtaagtaattcattaaaagtgtcaataatagagaaatcataaatttatcattattgacagtattagattttaagggtaggataaaattgaaatatttctggaaacaactttaaatattaccagaaggaataacttttaaatatataattaatatttacatagaaaggattttttatatgactaaaatagatattatttcagggtttcttggggcaggaaagactactttgattagaaaattaatagaagaagcatttcagggtgaaaagcttatgataattgaaaatgaatttggcgagataggaattgatggaggatttttaaataattcaggaattgaaataacagaaatgaattcaggatgtatttgttgttctttagttggagattttggagttgcacttaaagaagcattagataaatattcgccagaacgtataataatagaaccatcaggagttggtaaattatcagatgtaattaaagcaatagaaaatataaaaagcgaagtagatattaaacttaatagttttacggcagttgttgacgctgtaaaatgcaaaatgtatatggataactttggagaattctttaataatcaaattgaaaatgcaaatactattgtcttaagccgaactcaaaagatttcagaagaaaaattagaagtatgtgtatcccaaataagagaacacaacaattttgcaacaataataacaacaaactgggatgagattaatggaaagcaaattctatctgcaatggaaagggaagaatcccttgaaaaagagcttttagtagaagtaaagaatagtaagtttgaaaatcatcaacacagcgaagagtgctgttgcaataatcataataaccatactaaggaagaatgtggatgtgataatcatgaacatcatatagattgtaattgcaacgatcataaccataatcatcatgctcatgatcatgagtgcggctgtggacacgatcatcatcatgcagatgaagtatttacaagctggggaatggaaacaccgaaaaagttttccaaagtagaaataaataatatattaaaaactttatcggaatcttcagattatggaattatattacgtgctaaaggtataatcccttgttcagatggaggatggataaactttgatttagttccaggcgagtatgaagtacgtgaaggaatagcagattatactggaagattatgcgttataggtacaaatttaaataagaatgaaatagaagagttatttgatgtatagatacaagctaaatatttcgatttatataaaaattgtgattaggtaagaggagtgaacatcactgataatatagataacccaactgagacctgaacttatgcatataatcaccgaaatgaataacatacttttgttccagtttctaggtaattctaaggctataaagttgcacccaaagtgctagcctcaaagaacaagcgctcacagagaaagttcgaataacgaaatataaaatttcgattctcactttttgaactagcacatttggaacaacttatagccaaagaatcacatccatcaaaattaccaatgaaacattccacaaaagtatattacccatttctagttgggatatatttcatagtataaatctaattaataattggcttagctacatagatatcccaattattaattagatttattatgagaacatatttccacatttactatatataaattattatctttagctagaaatcataaatatatttgtggagaaaacatttgaaatgagctgttaaaggttcttagatgtaggttgttccactttggcttgtgaagtgagagtccaaaattttattttgggttgtcgaacttcctcagcgaatgtaatgagtcgagcttccctaggaaagttggagcatgctaaagtggatacaacctgccgcttagaaacttcagcgatattttcatagcttttcggaatcaaaatatttatgatttcggtaagttataacataagtttagttttaaatttggatatctataataaaactcctctctttaatgaattcaaataattgaaattcatttgagtttatttagtgatattatcacatttttttgacctatatctgaagaaggactttcatcaatttcgatttcagggatatttagagaatttttctcacctaaggctttaattatccataagattcttttttgatagtcctgtagtaatttcctattcatggacattacctcttttcatagaatttaatatgtagtaggttatactaatataaataaaatatacattaaatgaaattttaagataaagtatttataattacgaggaaagaaatttaaaattatcaataaaatttaacaggaagaaacaatttaagttttgaaatattaaaaaacttaaattataaatgtaaatttatagatagaattatgttacatttaattagaaaaataagtgaaagaaggaattgatttatgacggatgtaccagtttttcttattactggttttttagagagtggtaaaactacttttataaaagaaatatttaatgatccagagttttatgatggggaaaaaattcttttaattgtttgcgagaatggtgtagaagaatatgaagttgaatttttgaaaaaacacaatgcaagtattgttagcatcagcaatatagaagaatttacagagttagcattaaaagaattcaatcagaaatacaaaccaaccaaggttgttttagaatacaatggaatgtggcaatttgacatttttgataatctgaagtttcctgatagatgggagattgctcaaattataacaactattgatgcatcaacatttgaaagttatatgagtaatatgaagtctttattaatagaacaatttaggaattcagatttgattatatttaaccgttgcaacgataaaacaaataaattgaaatttagaaatagtgtaaaagctattaattcaagagcaaatatgatgtttgaattagaaaatggtgagattgatgatagtcccttagaattaccatttgatatacataataaagtaatagaatttaaagactacgattatggggtttggtacttagatgcaacagaatatccagaaaagtacgaaggtaaaaatataagagtgaaaggtcttgcttatagcaatccgaagtatcctaaaggtgtttttgcatttggtagaaatgcaatgacttgctgtgaagatgatatatcatttttaggtattctgtgtcaaacaagtaaggcatttaattttaacgataaggaatggatcgagctagaaggtataattcataaaaaatatatacagcaagaacaaagggagattccatatatagttgttaaagattataaaaaaatagataagcttgaggaagaattagtttatttttaatagattagtcattgacataaagttaatatataaaagcaggtatattggaaaatttcttaatatacctgctttttatgtttgttgaatttataaatttgttgaaggtttttaactgatttttaactgattctggtatctttttcaataaactttgcaactccatcatcatcgaagcttgagaggacacttgttgcaactgcctttgcttcaggaactccattttcaggaacatacgaacgatctgcagattgtaacatttcaatgtcattaaaattatccccaaaagcaattacttcatctgcaccaatcagttcctttaattcttttatagcaatggccttagatgctttagaactaaatatatctaaaaagtaattatctttatatacatttttgttaggaacacattttaatatagggttatctaaaatacaattttcaacattttttatacgatcaaaagaaccatacaaaacaaaatataaaattgtatacccatcatttggaacttgtgcaaaatcatcatattgatgacaacgacctttgtataataaatgcctttctgtaaaatactcaagatcatatgagtcatcaagattgttgtatatgaagtggatatctccatctttcaatgcgtacataaatccgtagcttttatatttatcaaatatttttattagatgatttaactgagatattggaaattcattaatttttagatattgctctttattcaaatcataaaatcctataccgttatttaatatgataggaatgttaatggggatttcacttatcaatctttttgcagcctgaaggtttcgtgcagttgcaatactaaacaatgtacctttttctatttggttctttaaaatttttaatgatgtttgtgaaatttctccattagaatttaataaggtaccatctaaatctgttacatataatattcttttattcatttattgcacccctttatataagatagaatatttctgtaaaataagtattaagagaatttatattacagtaatttatatattgtgagtttagcataagaaagctgtcaattcaaggaaaagcaggatatataaatctattaaagttaatggatactgacattcatggaaaaattgacaaatgactattttaaaatataatttattatagtatgtaattaaaagatagttagaagtgaaaggacattttatgtatcaagaagaaagattatatgaaatattaaatatacttagagaaaaaactgtgttatccaataaagaaataatggacacatttaatatatcaagggatactgctagaagagacattgttagattagtagacgaaggagttgctattcggactcatggaggaattgcagtgccatctataagaactgaaattaaggattataagagtcgcctagctataaattcagaagaaaaaataaaattgggtagatatgcagctaaatatatatcaactaatcaagtatgtttttttgatgtgtctaccactgttgaagcattatgtcagtgtgttgcagatgatatttctatatatacgcattctttagacaatatgaaaatacttgctgaaaaaaattgtgacgttcatttattgggtggaaaactgcaacgtaaaaatcgttttttatatggcagtggtacaataaatcaaatcgaagatatacattttgatatagcatttttaggtgctgcagcaattagtgaagatgggatttatgtagttgattttgaggattcctatataaagagaaaggtagcagaaagaagtacttttgtatgtgttatagctgatggtgaaaagttttttaattccagcacgtttaaagccatttcctttgatagaatagatttattaataactacaaaagagccgcctgagaatataggaaaaagaatgaaagactcgggaactattattgaaatagtgtgatcttataaaaaatgagaataaattatttacgtaatttattctcatttagcttaattaaattttattttgctgctttattagtccttttctgtaagcattaagaagcatctttaagtcatctatttgctgctttagagttacacctacatcagtatcttcaactcttttcctatttacaacttgctctagtaagagagttgtagataagatgtcagtctcttcttttatggctgcttcggtggattcaaatggctgatgagataccaactgaagcccaaaagagttatatattaacgtatatccagctagtccagttttgggctgatatgcttttgaaaaacctccatctataactagtagagttccgtttgcttttataggactttctccatttttttcttcaacgggcatgtggccatttattatatgagattcaggtgaactaagtccaaattcatttagtatttttttgcagatatcctcattatctcttaagctaaaatagggatctttcttttcataatgagtttctttttcttcaataaaatattgttcaaatattgtcattctatccttaccaaataatggcgaagaagcgccgcaccacaaataccacattatatcttctttattatctgaatcatccttgtcttttgaaaaataggcctctcttgccagcatatccaatttgtctaaaagttccttacctttatactctttgtcagctatttttacttttttaaaacttccatcttcatttaatggtatgaatccatgatataataaatttgaattaaattttaaatataaactaccatttgaatataggaatcgaacatgcttattatatttatcgctattaataaaagaggtttttaacttatcaattaattctttctcatcatgagtaagttcatatggatttttaggatctatagtaggaaaaaatgaatctttcagtttatacgttttaccgtttaagctaatagttccttcgtcataattaattttatttaataaaagccgatgattcatattaaattcaggatgccttaaaatcacctgaccctcaagtttaaataatattatagctatggctttgtgcatttgagctattaaattaatttcattaatgctgtattttttatcacaatccatcttaggtaagaagatattacagggatgatccttataaaaatccatagaaaaagttgctagagggagaaggttaattccgtatccattttctaaagtatccaagttagcatactttagagaattttttataacgttagcaatacatacgtctgaaccacaggcagcacccatccataagatatcatgatttccccattggatgtcaacagaatgatattcaactaaagtatccataataatatcggcaccggggcctctatcgaatatatcccctaaaatatgaagtctgtctataacaagtctttgtatcaatttagaaagagcaactataaattcctttgatctatctgtgtctataatagttctgataatttgttcataatattcatatttatctattcctttaggctgttcatgtaagagctcttctattatgtaagtaaaatcttttggaagagcctttcttacttttgaacgtgtatatttagaagaaacatatctgcatatttcgattaatctatataaatttattttgtaccaatcatctatgttttcttcttgctttaatactatctctagcttttgttcaggataatatataagtgttgctaaactttttttctcgctttgcatcaaactatttccaaaaagatcttcaatttttctttttattactcctgatgcgttttttaatacatgaataaaaggctcgtactctccgtggatatcagttagaaaatgttcagttccttttggtaaatttaaaattgcctgaagatttattatttcagtagaagcttcattgattgttggatattgtttagaaagcaactctaaatatcgcaagttgtcagatatttcatcagttgatagaccgtattttttcattgttacatctcctttgttgctattaagataatatcttctataactaattaaattatagaagaaggtttaataataaacaataatattaataaaataagagctcaaagtaaattaagctcttattatcctatagatttatattttacttataccaataagaatcataacagatctaggttctatctcaagtgtttctccaactttgggcattttatcaattgaatcgctaatatcttccccaaaaggcatagctgtatttacagcaattcgccattccaagtatatagggagctcaggtaattttatatattgcgtttcccaatgtgcattgatgcaaaggtacacaatgtcatcttctttttcttttttattccagcctgcaaacattatcccaactgttctagtactatctgacggatctaaataccaaggttctataccgtgcttactaacatggggtaagccacatcgtgattcttcaatcctgtccttaatagcaggatgccgttttcgaaaatttatcatatttttaaagaaagtaaataaatcatgattcttatataggagactccagtttaaccacgaaatttcattatcctgacaatatggattattatttccaaactgtgtatttccaaattcatctccagataaaagcattggggctccttgacttgaaagaagaacagcacaagcattttttattagctttcttcgtaattttattatattttcatcgtcagtttctccttcagtaccacaattccagctattattgttgttttcaccatctgtattattccaaccattttcttcattgtgtttatcattataagaatataagtcatataaagtgaatccatcatggcaagtaataaagtttactgaagcattttttcctcttatatctggattatagaggtcatacgatccggtaattctttcagcaacagtggcagctaatcctgaatcgccctttagaaatctgcgaatatcatctctatattttccattccattcacaccatcttttccaagatggaaaactgccgacttgatataatcctcctgcatcccatgcttcagctatcaattttgtatttgcaagaatgggatcaaaggctaggctttgcaatagtggaggattattcattggtgatccatcttcatttcgaccaaggattgaagctaaatcaaatctgaatccgtcaacacgatattctgtaacccagtagcgaaggcaatctaaaatcattctatggactattgggtgattgcaatttaaagtatttccacatccgctgaaattataatatttcccatctggtgtaagcatgtaataaacattattatcaaaccccttaaaagatatatatgggccatactcattgccttcagcagtatggttaaaaacaacatctaaaataacctctattccatcttcatgaaatttctttatcgaagacttcagttcatccccttctttattacgttcaattccagcagcgtaactggtgtttggagcaaagaaacatacaggattataaccccaataatcacaaagcaaattacctctaacatatcgtgcgtcaagcatttcatcaaattcaaaaattggcataagttctacagcattgattccaagctcttttaaataaggaatcttttcggctaatccagcaaatgttccaggataattaacttctgacgatggatgcttagtaaagccccttacatgcaactcgtaaataatcaaatctttcataggaattaaaggtcttttactgtttccccaatcaaaatcattagagacaactcttgatttatattgatttccacatattgtttttgttccccatacactttgcccagcaatcgcttttgagtagggatcaagtaaatatttactactatcaaaaactaatcctctttcaggtatatatggaccgtccacactatatgcatattcaaattcttcaatatctaatccaagtactatcatagagtatacattacctattcgataatattcaggaaaaggaatgacagcataaggttcgcacatagcaggcttaaataagagtagtttacatgatgttgcgttctgagagtggatagtgaagttaacacctcctggtataactactgcaccattttctagataaaatccagggcggattttaaatccctcaaattcgtccgtggggattaaatttttctggagtgttttgacaaattcatcgaaatttacagtattttttaaggtatttatatctagttctatattctcagcaattgaaaatttagaagtatccataatatattttcctccttaatattattaggaccctcttagttttattatattaggatgcatatgattttaatcgataaatgaaataattattcaattattacttaaattattgcatcaaaattccaatttatatgcttttaactaatgtaagttagaaatataggattaagatatttaagttgtggtataattttcatataagctattaattgcataaaatcggttaaataaaaaataatctctgatgaggggtaatatattatagacaataaacaaaatgaagaatattttgtatgaaataaaaggagaagctatatacatactataagatttgggaatgaggggaaaatagatgactaaaaaattaatttacagtttacttattgtagcagcggtagtttctgcaataccaaaagaagtttcagcagaatggaagcataataatactggttggtggtatgaggaaggaaaatcttatagtactggctggaaacaaataaatgggtcgtggtactattttggtaatgatggttatatgaagactggatggattttagataaggtttggtggtattatttacaggataatggtgctatggcatctggcaaaacatcaattaaaggaaaggagtataagcttgataataatgggaagtggataaataatgctcttcctaatagaaatgttaatattaacattagcaggcctccttcagaggaaaaaatgagtacaatcccagattttagcttgtttgaggaaaatggaaatgagtattttaaaattcaagatagctattatcttaaaggtgtatggaatatagatggtaatatatatatttttgatgaaaatggtgtgttgcaaaaaggcgaatatacgtcagaaagtggcagaaaatatagattgggagatgatggcaaagttatagaatgtcttagtgataaaaattataatttgtgtccagaatatgcactgactactaaatcaactacagagaactacgaagttaaattagatgatagtaatatgcttactataactgatgtcaattcagatgaaccagaaaaggatggagtaagaattgaagatggagcaggttacaaattagacaatactaaaccaaaggcaactattaatggaaatactttacattgtagaactaatcaagctatagatttaggaatgataaaagtaagtagcgtagatgataaaagttcatcatttcctaatttaatagcaatatctaagagtgaggatgatagtgttgcggtttcaggaataaatttgagtttggaggatggattttttaaagagattcatccaaccgttattgcatacaaagccggaaaaactactattacaataaatgttaatggaattaagacttcgttcgatgtaatagttactgaataattttctacactaatatgcgtaaggttaatatttttataattgttatgtttagtatatataatattatattaaaatataaactcaaatagaagaattgagtaatatatataagtattaatacaagcttaaataaaaaagaaaatagatatgctattttgactagttacacaattttagtaactagtcatttatggttttgaagaggagattacttgtcaattaaatttttctcatattccgctatcattttttttgtcatcaatcctccaattggtccacctacacgaccatttaaccttgatgacttatttcctttataattatcattaagttctatgccaagttcattttcaaattctatttttagcttatctagttttgctctagcttctggaactaaaggccttctgctcataatttaacacctccatatcagtattagttttataaatttatagtaaaatatacttaataaattattgaatttaactgaaggagtattctggaaaattaatacaaaggagaattttaataatttttttacaagtatttgcatagattaaaatttgtgagagtggttaatatattaatgccaaacaaaatcatagattaagggaggtagattaagatggcttcaagaaataaaactttagttccagaggcaaaagtaggtttaaacagattaaaaactgaggtagcttcagaaattgggttaaatgactatgaaaacattgataaagggaacctttcttcaagacaaaatggtagtgttggcggagaaatggttaagagaatgatagagagttacgaacaaagtctctagaaatagatacttaatgttttaactcagttcttcaattaccatccatcctaaatgaaagctagtagaatatagttaattactatttattctactagcttttttattgtatatgaatctatattcaaatgaaatctatggaaaataaaagagaataaaagaaataggaagcatagatgagattctgaaaaataatgaaaataaaatgagatagatggcagaaaatttatatggaattactttacaatatggtataaaatgtaaaagaaggcgattaaacatatactcaaaggagttgaataatatgttatatttatatactatatcaataaagttaagttgtttatccttaatattgctattatttaggcttattataaacaagaataatattaatatttttgctaacaaggaaaaaagaggtctactgataaccatacttgtcattagcattgtaccaataattaatatattttttgcagtttcaagtatatatgcatcaatttttatgaaaaaggaaaaatttataaaattcatcaatgaatagctttagaagaatctaaggctattttttcatgaacttattacctctataaacgaccaataaaaagtatataaagatttttcatcataaagtaattataaatttgtttagaaagtaattcataaatattaaattattgatatatatgacaacaatattacgatattattatatattttataagatttatataagcgtatttcatctttctcagttacagatataatatttataagaagtttaagattaattaaattatgtatagatgattaacctggaggagatgagtttaatgaaaattagatatatgttatcggaattatggattgcgtttggttttccaattatagttttaggaattataattttagtatattacttttctaaaaagataatgaaaaagaatatgtttttttataagatatttagatgcataaaaatatcatcttgcatcatatttatttgttttataataatagaagctttaataataaattatccaaagtataatcgaaatagtgacgattatattattgtacttggcgcaggacttgataatggaggagttcctaatttaatacttcgggaaagacttgatattgctataaaatgtatgaaagaaaatttagctcagtatatcgttttatccggaggacaaggtacagatgaaagtacatcagaggcacaggccatgagtgaatatttacaggctaaagggatagaaaaaaacaagataatattagaggataaatcaagagatactaatgaaaatttaaaatattctaaagaaaagattgaagagtttagtaacaaatcaataagtgatataaaagtaaaaatagtaacaacagactttcatgcttttagaagtagtattttagcaaagaagaatgggtataaaaactttgataattattccagcaccatgccttggtattttgtaccttcaacatatgctagggaatccattgcagttattaagagtacattgtttgacaaataaatgagtgattgtgaaataattacactaaaacagggtttataaatttaatttataacaacaaacgtttacaagcacaagatatacataattaatatataataatacaaaagattatatatttagttagaaggggataagtatgttggcggtagttattttggtttgcatagtattaattgcatgtaatgctttttatgataccgataaaagttgaaaaatagaaatcgtcaagcaaaattagactaactgtataaaactaaattggatttttttaaaaactaagcagatataatttaaggctatctattcattaagatagcctttttgtgtttatagaaattaaaaattaacatggtaacttgattataaaagtagatccttttttacattgactatatacctctatttctccaccacataagtcaacaattctttttactagtgctaatcccaaaccattgccttcagaagaatgtgatttatcgccttgataaaacttatcaaagatatgcttttgtgtatcttcgttcatacctatgccattatctgaaatgcttgttgtaatccagtttttatctttctttaaagtgcatctaatagtaccattttcaggtgtaaattttattgcattactaagtatgtttatccatacttgcatcaacagttcttcatttccatgaaaagtaattgagtctaaatctatatctaagtcaatatttttatttgaccatttggattctaaaagcaatagagtttgccttagctgttcatctaatttgaatttacttctttctgctattatatcttgattctctaatcttgaaatctgtaatatgctgccaactaagcttgatagcctttttgtattatttaatattttatctgtatatttagacttttcttctttacttagattgttgtcctgtagcaaagttgtgtaaccttctatagatgcaaggggagtcttaaattcatgtgatacattagcaataaagtcacttcgaaaggtctctatgttatttagttcgtctaccataatattaaagttctgagacattttttttagttcttcaacgtagtaatacttatcttcgtctaatttgatattaaaattaccttttccgacttccataattgcttcactaaattttactagtggagctaatatttttttacctattatagctgatatggttgtcccaactattatactaattatagataaatcgataattggccaaagaaacttattagcttccgaagagaaatttggatgaaagattatggctaaaattgcagtaagtactgatgatacaaacattattgaaaaaataataaatgaaaagactaagcctaattttaaatttggtttatcattcatatttttttaccaccttatatccgagtcctcttacagtcaagatatcaaaatctatgttatttttaaagcgatcacgcaaacggttaatatgtacatctactgttcttatatcagtttcagaatcaagtccccaaaattcatccataagttcttgtcttgtgaatatgcgattaggataagaaatcagcttatatagaatataaaattccttttgtggaaggactgttgcctcaccattttgatatactgacaaggaatcgtattctagcatggtatcaccaacactttgctttctttcactaataatctgagctcttctaagtaatgcacctactcttaacaccatttcgttaacatcaattggtttaaccatgtagtcatcaattccaagaagaaaaccacgttgcttatcctgaaagctttccttagctgtaatcattaatataggtagattaaattgagcatcacgaatagattttatcagttcaaaaccatccatatttggcatcatgatatcagaaataattaaatcaatatattccttatccaaagcattaagcgcttcgattccatctttcgcactagtagttttatagccattcttaagtaaaacagttgaaaataattctcttaactctttgtcgtcttctacaatcaaaatatgaaacatttatatacctccattttatgcactaattatactacttttttatctatgtttaaaagcatcatatctatatatgaaattcaagtatttaattatagataaaatatttactataataattaaatttcaaataaatagaaaagtttaaattcagttaataattctatgatacactccatattaaaataacataagtagcaaatgatagctatagataaataataatccagaaaagtttaggatgatatgttctgtaacgtataaaaattaagatattttttagattacaaccaaagtataaaaattaaaagtatggtattatttttatgtacatataaaatatttctataattcatttgtgtgttaatagttgactgtctggtcggtcatttaaataaaatgtgaatataatgagtcagtaatttattgtaatacagtatttttataagtgaggtggtttttttggcaagattgaaaaataaggaaaatgaaattcttgccgctgcaatagacatattttttaaaaaaggtttttcaggaactaatatgcaggatattgcggacaaggcgcagataggtaagggtacaatatatgaatactttagaagtaaagatgatttatttgtacaagctttaaagtacgaccatagaaatttcactatgaatgcaaaccagaagatatcacaagaagaatcatttcttaaaaagctaggaaagcttatagaattaactgagcatgctattatagaaagggctggaagggtaagttattatataacaaatgagatttcagaattaaatcctgaagcaaaacgtgatcttgaaaatttcataaaagatataaaaagaaatggaaaaaatattacatacaatattctaaagcaaggtatcgaagagggggcggtaatggatacagggatagacattgattttgctacaaatgttataggaggaatggtggcattacattgtcatcggacttgtcatgaaaattattattcagtagaacaaagaagagaggaaaatgaaaagctgataaattttattatgggtggaattggcgcaaagaaaaattaattttataatatataaattaacaaaataaactatatgtttacagattaggagtgtgaaacatgaaaaatgtaaaaaaaatagttatatatgctgtaattgttatagctgtaataggttgtgtcgcagtagctaaaactaagttattcacagcaaaaaaacaagcaaccacagctgttgcagctagtaaaacagctgttgaagcgctggtagtgaaatcagaggaaaaaagtttgggagattcatataaagcaaccttagaagcttatcagcaaggaatcgtaactagcaagatagcagcaaaggttgttaatgtgtctgttgaaaatggacaatatgtaaatgctggtgatactatagctacgctagatgaccaagatatacaaaatagtataaaaactgcacaagctcaggtgcaagttagtgagcaacaactaaattcaacccaacagcaactaaattcatcgcaagtaacgctgcagaaactacaaattcttatggatgatgcacagcgtaattatgacaggcaaaagacactttttgatggaggggctatatcaaaaacagatcttgagtcatctgaaaaagttctaaacacttctaaagcagattatagttcaggattagcaagtattgaatcagcaaaagcaagcattgaaagttcaaaagcaagtttagaagcacaaaaggtaaatttgcaaaaggctcaaagcgacttagctaacacagtgattaaagcacctataagtggcgtaataagcgataaagttttaaatgtagggcagatggcatctcagggagcagctcttgcaaaggttaatgatatatcatctgtatatgcaacaatacaagtaccgcaaggaaaaataggaggagtacagataggtcaagctgcaacaattacagtagatggaagtgataaaacttataatgggactgttcaaactatagattcagctgcagatgctacaactagagtatttaattgtaaaataaaaatagataatagtgataaatcattactgcctggtatatttgcaaaggctcagcttattagtgatcaaaaaacacaggttttaactgttccaattaatgctttagttggtaatgaaggggattattctgttttcatcaatgataatggaacagctaaaaaacaaaaagtaactattggagaaacaaatcaaaacagtgttgaaataacagatggtattaaagatggagatcaagtaatttgcacaaatacaagtactattcaagatggtagtgaagtagacgtagctataaaggaagataataattcagataaagcagcttctgaacaagatggcagtgcagatgatgcaacaactaaataggagggataataaatgaatatagcaaatattagcattaaaagacccgtatttatatcagttataatgattgtccttactatattggggtttgtatcttacaaaaaattagcacttaatgatatgccaaacgctgatttaccatatgtttcagtagttgttacagagaatggggcaacaccggaagaaattgaaagtaaaataacaaaaaaagtagaagattcagtacaacaaatttctggagttcaaaatataacttcaagtgtaagctcaggaatgtcacaaactgttatagaatttgacttgagcaaagatagtaaggttgctgcacaagaagttagagataagatttcaagtgctcgagggcagttaccaactgatatcaatgatccagttgtctcaaattttgatatgtcagcaacatcaataatatctatagctgtatatggttcaagtgataatcaagaaatggcagactttgtagataatactttaaaaacaaagttatacacggtatctggtgttggagcaataaatgtatctggtgaggatacaagagaaattcacataaagttagataataataaattattacaatatggccttacatcaagtgctgtagtaaatagtattagaaatgataatattgatcaatccactggaaaagttacagatggagataatgagatatctattacaacaactagtaaaatacaaaaaatagaagattttaagaatattttagtatctaataaaaatggcacagaaattagggtaagggatattgcaacagttgaaaatgggattgaagagagaaaaagtcaggcttattatcaaggcaatccatcaattggtattgatatagttaagcaatctggtgctaatacggtagaagttgctaaagacgctaaagcagcattagaacaagttaaagcttcactacctaagggcatgcatgctgatattgttagtgataattcaacatcaataaaagatacagtagatgatgttatgaatactatcatagagggatgtatattagcagttgttattgtattcttgttcttaaatgaatgggaaagtacacttataagtgcatcatctcttccaatatctataataactacgtttgtatgtatgaaagagatgaactttacactaaacactatgtctctaatggcattatcactggcagtaggacttttaattgatgactctatagttgttatagaaaacattgtaaggcatttgcatatgggaaaacgtccaattgaagcagctagagatgctacgtcagaaatcggatttgcagtaattgcaacaactttagctgttatcgctgtattcttacctttagcaatgatagaaggaattattggaaagtttttcatagaattctcacttacaattgtttttagtatggcggtttcattatttgtatcatttacccttgtaccgatgatgtcttctagaatgcttaactcagaaagaagagagagtaaaacatttgttggtaagtttttcaaggggtttaatagtaaatttgatacattagctgaaaaatattcacatttattagcttaccttcttcataagaggttaatagttttagctgtttgcggggttatgtttatagcaagtcttgctcttattccatcattaggttttactatgatacctataactgataaaggacagataactgttagtgctaactttgattctggcataacgttagatactgcaagtcaagagactaaacagattgaagagattattaagaagaatccagaagttcaatatttatattcaacagttactaatagcaaagcaacagttaacattacattggtagataagaaacagcgtaagatgagctcaagagatatggcacaaaaacttggaaccgatctaaaggtactacctggaatggaggttacagcatcagccgcatctatgggaggaggcggaggctcttctaaagatgtaacgtatgaccttgttggtagtgatagagcaaaagttcaagcttttgcagaaaaaatgaaagcagagattgctaaggatcctcaggcaagcgatgtaggtgttaatactaactcaggtacaccggaagtaaagatgactgtagatcgtgataaagcagccgatttaggcgttaatagttcagatgttgcaagcactttggctacattatttaatgggtcaactgtaactaaatatgatggtggaaaagatagatatgatgttaagataatgttacaagatggtgagcgtaaaaatcttaataacctagatggaatttatgtttctggttcaaataataagctggttcctataacggatgtaactaaaaaagttgttggaacaacttcttcaacattacacagatacaataaacaggcacaagttgaactttcttgtaacgtaaaaagtttggctacaggtactttcaaagataaatatttagctaagataaaaagtgaattgccaccaggagtttcattatctgttggaggatcaatgggaagcatgcagaagagtatggatagtttagtgcaaaatgcagttttatcagttcttctactatatttggttatggcagctcaatttgaaagttttgttgatcctatagctataatgtttgctttaccacttgcaatgattggagcaataataggattatttgctggtggaagtcaattaagtatgatagccatgataggtatcataatgcttatgggactcgttgccaaaaatggtatcttgctggttgatgctgcgaaagaaaggattaaggagggaatgcctcgaaatgaagcattagttcaagctgggcttgtaagattgcgtccgatagttatgactactttagctatgatatttggtatgattcctacagcaatagctacaggagcaggtactgaaatgcgtaagccgatggcacaagcagtaattggaggactaatcacttcaacaatattaacattatttgtagttccaatagtttatacaatacttgatggattaaagaggagatttgcaaaaaaaattcgtagaaaaaaatcaactccaattgatagcgaatcaaatataagcatataacaaagaaatcactaattttaataagatcatactaaattaagttttagtatgatccatatatgaagtgtattagtttaaatacaaggttaaggagtaaatcctaaattatgactacatttactaaacaataaaattgtagtaaaattaagctacaacagaaaaataatctagtaaataaaaatagacgtggaatttatattaaaataaatattaatgaagaggagatttatacatgagaaaaaatataaataagataatagcatttgcaatagggattagtgttatgagtggtagtatcgtaccagcgcttgcagcagattcaactcaacaaacaactactagtacaagcactgcaacgaattcacaaatcgtaaacggaaagccattacttactttagatgaagctataaagtctgctattagcattagtaatacattagcatttgatgagcaaaaaataagttatcaagataaaattaatgatcttaatgacaaaattgatgataataatggtaaaattaatagcgataaaaaagacctagatagtgatactgcggatactactttaaagcaagttaagcaacaaagagattttgatgaagacaagctgatacaaaaaacaactactgcttataatggaattgttacaagtcaaatgaaaatagataaagcaacaaaggatttggaagttaaaactaaacagctaaatgatgcaaatctaaaaaagagtttagggattataacaacaacagatttgacaaatactcaacttcagatcgaaagtttacaaaattcattaaaaacaagtaaaaatgcattaaatgattcgattgcaagttttaaagttttaactggtaaagacgtgtcacaatatagtctagaacaagatattaaatatgatacatttaaaatagacggatccgtagatgaatatttagataatgcaatagataattttgaaaaatatactgaacaattaattaagcttaataaagattatctaaaagataatgaagttaaggaaccatctaagccagcagaggttgatgttccggcagaaccaaagttcacctcaacttcagatgcggcagatataagtaagtacttaactgattatcaaaattatcaaaatgctttagctgctagccaagcatatgcagcagggttatcagcacgtataacatatttaaattcaaaactaggtgtttatcaaaatgaaactaatttaacagaaactaagaagaaatttaaggatcagttaagaacattctatacaaatcttctttctacagaagatagcattactacgttaaagaaaaatatagagctaaataataagcaacttagtgatgctaagcttaaatatgatttaggaatgatgactaaatcagattatgatgctttagttgtaaacagtaaagatttagagattcaactaagaactttaattgataattataatactctaaaagaagagattcaaaaaccttggatagcattttcttaaatttggctataacattcacgattaagtataaattttaattaaaaagcctgtatacacactctaatacgataatttattaggttatattgaagtatatacaggcttgtttttttattgaaaatacaacttacttctaaataaattgttatattaaatgataataataggcttttcgtaaaataaatttaatacaaaaagtacatggtttcccacatatagtatgttgagcgtgttttgtgaataaatagattattatgagaatatatattcatagaagtattcggagactatgaagtttattaaaataagaaaagcaatatttttcgattaacttttctaagatatagcagataagtaaaaagaaatgatttaaaagaaaaaagaattataattgaaaggtaaaatgatacctatagactggacacatgaaaaaaagtgtttagtctgtaggtatttttttatataatgaaaataacaatggaggattagaatgagtaagattttattttcaaaagaagatataataaaattagaaaaaaataataatattcttagagttagtgaacgttcaataacctatacaaatgaatttaaaagactttttattgaagaatatatggctggaaaattacctagagaaatatttgccgaaaatggatttgatattaatatcatagggttaaaaagaattgagcaatcagcagccagatggaagaacttatatgagaaagatggaattataggtttagatgatagccgaaaatgcgctagcggacgaccacgttcaagagagttgagcaaagaagaaataattgaaagacaagaatctaaaataaagttacttgaatcacaggtagaactgttaaaaaaattagacacgacagaaaggttgctgataaacagaagtaaaaatctaaagattgctgatatatttgaattgatagctactacaataaaggaaaataattttaaaaatttaacaggatatttttgcaagttgctctctgtttcacggtcgggatattacaattatattaattccaaagaacatagaacagctcgtgaaaacaaagatttagacgctaagaatataattctaaaagcatttaatcgccgtggatacaagaaaggttcccgttctataaaaatgattttagacaatgaatttaatatagtctatagccttaagaaaatacaaagaataatgaggaagtacaacattgtatgtcctcatagaaaagcaaatccatataagcaaatggctaaagctactaaggaacataggactgttcctaatatactacaaagaaattttaagcaagatatacctggaatgatattattaactgatattacatacttgccatataacggaagtgatatggcttatttatcgaccattctagattcatcaactggcgaaatactagcccaccacatatctaaaagaattaccattgatatagcaactgaaacaattaataaattaacaaggcaacgaagagttaaattacataaaaatgccttcgtccattccgatcagggatgtcattatacaagccctatatttcaggacttacttaaaaaaagtcacctagggcaatcaatgtcacgacgtggaaactgttgggataatgcgcctcaagaatcttttttcggtcatttgaaggattctgttaaaacaagaatgtgcaaaacttttgaagaacttaaaagtaaaatagacaaatatataatatattacaataattacaggtataaatgggatttaaaaaagatgactcctgttcaatacagaaatcatcttttgagtgcttaacactcttttttaaattgtccttgacataggtagcagattaaggagagtgtccttttaattataattcttttttcgtgtaatatatttatgaatttttagtttttctcataaaatcttctgagtttacaataaaccttatatgagaacctttaccgatagtaccttggtcatcacttgcttctacatcaaaaaataattttttcccatctacttttgtaagagtagctttgcattttatatttgctccaattggagatgatttaatatgtttgacactcatgtcaattccaactgtagtatagccacttggaagttcctctattactaaactttttgatgcattttccataagagcaatcatagcaggggttgcatagacttctagatcacctgatcccatttttatagctgtttcattttctgtaactttaaactctttgacatatgaagtaccttcatttaaattaaattccatcgaacaaatttctcctctcaataaatatagattcattattagatatgttacattataataatgttatagtactaaaaattttcatatttttcaagaataataaaaattggtaaggattaagaaaaaaatgtgtttttaatattaaaataaacctttttttaaagttaaaaaggaaaatttataaaaattacatatgaaaaataataaaaaagtaagagaaaaattaaattaatgatatttcaaaaggatattagaaattgttaataaaaaataactagcagattaaattctaccagttatttttttatatgcacacgtaaatatttactattaataagttgtatatattaaaaatataattttatcgtctcaagttatcttcgtaaatatcttttttagaagatggaggagttacacgaacatatgcatattcaggagctttatacccgggaccatatatcaaaaattcgataattttcttagcaaaagccttagagagtatttttttcatttaacatcactccttacctatatgttacattaattatattggaatattcggaaaattgcaacattttattaataaataataattattatccattataatacatttatttttatagaataaataagtataatagtttttttatgctattcttattacaaatctatgatgtatatataaaatttattaactttttcatctagtaaattttatatataccattagagaataaatactagtatagtctcaattatgtttttaaaggaagaagttagtaagctatataagatgatgtttacataagtttcctatatatccatagtaaattaattgattgaaaattacattaattgtataattttagatgagttgattgagacggattaaaaaatacgtaagcacttaatgaaaattaaaaggagactgatccatgtgaatattagaaagaaacttacttcatttatactggttttattaactagtataagttttggacaagtaataagtgtacaagctgcaactactgattcaactgtagtatctagcaatactgttagcaagccatcagaggaaattcctaatccaggtatacctgaaaataagccaagtgaattaaatgttatttataaatatagtacccaagatattgaaaatagtgatgatggaaaagttaatataacatcaactattgggtggaaaaaagagaatggatactggtattactataaatccgatagtacaagagcaactgggtggataaaaccagataacaagtggtattatttaaaatacgatggaagaatggtaacaggatggtttaatgttaatggcatatggtattatctagatcaatcaggcagtatggttactggttggagtaaattaaataatgtttggtatttcttaaacggttcaggggcaatggtgacaggactaaataaaattgataataaaatttatatgttttatagtagtggtgaaatggcgacaggatggtataaatcaggtgataattggtattactctagcagtagtggaagcatggcaactggatggattaaagataatggaacttggtattatttatatgatactggtgcaatggctaaaggatgggttaatattgatggaaagtggtattatttaaaatctagtggagcaatgtcaacaggatggataaattctggaagtgatacttattatttagataaatcatctggggctttagttacaaattctacaatagatggttataaaattggttctgatggcaagaagatagggccaggaaatccagtcaataataattctaatactttactaaaagggatagatattagtcactacaatggggacatagattttaaaaaagttaaagcttcaggaatccaatgtgtatacataaaagccacagaagggacaacctatgtggataattatttgggaattagttatagtggcgctcaaaatgcaggattaaagacagggttttatcactttttagttgggacaagctctcctgagactcaagcacgtaatttttacaatagcataaaagataagaagaatgacttgaagccagctttagatatagaaaaagatggatttgatgttatgggttatgcattaaggttcatagatgaatttaagaaattaagtaatatggacatttgtatatatacatattcagattttataaaaaataatttagatagcagattatctaaatatacattatgggaagcaaactattataagagcccatttaatttaccagctaatagtatatggaattctagagcaggacatcaatatacagataaaggtgctatcgatgggatttatggagatgtagacttaaatgaattcacacaagatattcttaataattaaaggttttacacaaaaagcaagcaaaccagtttaaaaaaagctatccttaaaggatggctttttttatatgcctcaaaacgaaaaattatttattataatcaattaatattattgcaatagaatttttttactaatgaataaagtaatataatgaaagttttcaccataacattgtaacttttttgtaacgcttttagtttaaaaatcttttatactttagatatagataaccacactaagacctgaacttatgcatataactcgccgaaatgaataacatacttttgttccagtttctgggtaattttcatgggggattctaaggctataaagttgcaaccaaagtgctagcctcaaagaacaagctttgaactagcacatttggaacaacttatagccaagaatcacatccatcaaaattaccaatgaaacattccacaaaagtatattactcatttctagttggaatatatttcatagtttaagtatagtttatgattgcgttatctataggataaaaaaatactaaagtatatattttttgaatttccaagtagattaatttatacaaaaaaataataaaaattagttaggagaataattatgataaataaaatccaaaagagatttaaattattgctttcagcagctataatatgtgctatcactataagttctgcaagtatagttgggtgtagttctagaaagtcacctgaaatagatgctgaaaataaagaagtgtcagttgagaaagtttcagaaaatagcaatcaaacagaagatgaaaaaatatcagaagaagtagtcggtcttgaaaaaatctccaataatgagggtaataaagaaatagcagctttgcaggtaaaaaagaaaaatgattcagtaaaaataattgaagatagcaagtctattgatgcctcaaagtcggataatggaaagaataattttacagaatatatgaatctattagatttgagtaaagaaaaacttataagcacattaaatgaaaagccaagttctataggagaaggtggagtggaatttaaaaaagccggtattagagtttggtttgatcagaaaaataatgataaggtagagcaaatctttactataagaaatgacttgaatttaaatggtgtaaagattggtgataagataagtagatttaaagaagtttttgggaatccagtcagtgataaaaatggagatgcacattttaagtataacaatatatttttatctgtaaattatgatgcaaacacagggcaaacctatgcgatatatattttaaaaaatgatttttagtaaattgaaaacaactttcttattttaaaattataggatgatagctaaaagccaagtattgaagcacaggcatttaatgaaaaatacaataaaacgtatagttcatataagcgttaaaaattatggatatgaagtaattatatatcatatataaggtaacactaaataataacagaatgaaaaatgggggggatatgttatgagaaaatgtgcaagagttataatactgattatttctttagggagtattataacaggctgtgggaatgttgtaaacgcaactagcttaattcaagcccctatgctcgaaaatgtagaagaaaatgaaattaataaagagataaaagaaattttaatgcctgacagcgaattactagtcactaagaattcacaagaaaaacaaagtatttttatggatgatgttgataaagatggtaaaaatgaagcatttgtattatatagggatatgaaagaaaatagacaagttcatctattagtgcttaaggaagaaaatgaaaaatggaataaaatacttgatatagccactaattttaatattctagattattttagtcttaaagatcttgatggggatgggaaaaaagaagttattttaggtgcttcaatatcagattctgaaccaagtaaacatttatttatatatgaattgaatggaaaagaattagttaataaagttaatcgtacttacgaatggatagatatatcggattgcaatgaagataataaacctgatgttataataattgatggagaaataggtaaatcaaaaacatcagaaatgtttaattatgaaaataatcaattaaaatctcgcgcatttgtgagcctaaatcctgagggtgtaattgaaaatgtcgttagtggaaaattagcggatgggaatcatgcgttattcattgatagtgcattaggggcccattcaatgttaactgaaattgttacctgcgataagggaagaattattaaaattggagatgaaaatgatggtattttatttaaggcttacccattatatagtagagatatcaacaatgacagtattatagatgttggaggaatgtatattcctaaaggttttgaagatgcagcgatggcagaaattccttttatttatacttactctgattataaagaagatggaacacatgaaattgtagaagaaagatatacagatagtgtacagcatttctatattacaattccctccaagtggcatggcaaagttacaattcaaaagcttgataaaggtgttagacttatagataatgaaagtcaggataatttatttgaagtaaaatggataagcaaaagttcatatggtgagaacaaaaccaagcttggagaaacgaaggatattatattttataatgatattaaagaagaacaacctatttcaaaggaaaattttcatttacttaaagatgaattttaatggaggaaaatatggaaacaattcttgttgttgaggatgaactgtcaattagaagttttatctgcctaaatttaagaaagaaaaagtacgaagttctagaagctgagaatggagaagaggccttatctatttttaataatagaaagattgatattgtcttattagatttaatgctcccaggaattgatggatttgaggtatgtcagaaaattagagatataagtcaatctgttgggattataatgttaacggcacgatctcaggaagaagatagagtaaaagggcttgtagaaggagctgacgattatttactaaagccatttagcatggttgagctagaggcaagaattatttctttagcgcgaagattgaatcatatatattcaaagaaagaaagctcagttattaaatcagggccatttgagcttgatgtaataaataaaaaagtatctcgacttggaaaggatattaaagtaactccaacagaatattgcttgcttcaatttttaataaataataagaataaggtatttacacggaatgatattttggatgaagtttggggaataaattatgttggtgatgaaaaagttgtcgatgtaaatataagacgtatacgaaggaaaatagagaatgatccatcagctccagagtatttacgcacggattggggatatgggtacttgtggaaggagtaaaactatgaagcgaaggattattgtttactttatgatgattagtttacttaccttaagtcttgtaatgatagggtttggaattggaataagacaatattattatcagggtattgctaatacatttcagagtcaagcagaggcgattccttttgtgttagcaagagaaactgattttactaataaaagcttggtggaattcagtgatgaaattattaaaaattatcagattaatggatctgaactacaactattaaaaagaaatggtgaattaatccaatcatctacaggtttttatgaagatagaacttattcgatagattctgatgtattggatctgaaaaccaaatataaaattgagaaaaattcatattcaggtcaaaagattatggcagtatatacaccttttgtttttgacgggcaagtattaggaattttgcgatatacaacatcattaacacaggtgaatgctttaattattaatctattaatttatggaattattatctgcatttttattgctgttattgtgttttttgtaagtttgcgtttagggaatataattgtagaacctttaaatgatattatcaattttacaaagaaaatagcagatggaaaatacaaggaaaagattaaggatacttatccaaatgaacttggagaaatagcaaaaacgcttaactatatgggcgatgaaatattaaaaactgatcgtttaaagaatgattttatatcatcaatttctcatgagcttaggacacctttgacaggaattaagggatggattgaaactatgcgagatccaaacgaattatcggatgaggaatttaaatttggtttgggaattattaatgatgaatcagaccgacttattagcttggtggagaatcttttagatttttcaagataccagtcagatagaattaaactaatattatctgatgtcaagatagacaaaattattcgtgaagtaacgttccagcttcaaaagaaagcagaaaaaaaggaaattaaattagtggttgaaacgcacccagcaattattacagcagatggtgatagattgaggcaagttatactaaatgtattagataacgcaattaagttctcatataaaaataataaaatctatgtcattcaatcagttagcaaagagtctattttaattgaaattagtgatgcaggtattggaattaaaaaagaggatataaatcatgttatggaatcattctataaaattgatcctaaatccattggagcagggcttggattagtcatttctaataatattatagatatgcataatggcattcttaaaattaatagtgaatatgggaagggaacaacagtaataatttcacttccgttagcaaaagtttaaattctacgtaaatgcttagattaaattaataattattagctgaaattttagataatatagaaaatttcagctttaattttgttataatgatgtctacatcagtaagttttatgatataaaagaaagtataaagaagttattattaaaatgaacgatgattttgaatttactgtacctatgataaaatacatgttacaacgataaatctatatttaaagctttagtaagtgagatacttagtcaaggctacaatgtagaaacctaattatgatatatataatgagatatttgttttaaggagttatttttatgaaaatgatgctttttacattagaaataatagatgaagaaaataataactataaaattaaagtcagtaatggtactgaggactccttagtagaatttaatcctttaaaaaaagaattaaattttatagataataacaatttaagcgatttctttaaaggacaggaataccaatttagaaaaatgcttcataataaacgtccagatacatactatgtagggtttaatgtaaaagtagttataagagaagataaagatgtagctgcttttaatgataggagtaaaatattagtcttagataaacgaaatagtaattatgatagttttgcaatagaagaaagtaaggctgaagaaagaatctataagatctatacagatgctagttattttgagaagaaaaatcatggtggatttgcttttataatagaagatttgaaaggaaattataatttatatacagaaaaagtaaaagacataggaagcagccaagcagaacttgaagcagctataaaagcacttgaattattaaaagatgttgaaaaaataagaataataactgatagccagtatgtcagaaaggggctcacagaatggttacctatatggaagctgaatgattttaaaactattaatggagaaccagctaaaaatatagaaaaatggcttgattttgataaggcttgtaatggaaaatatattgaatttcagtgggtaaaggcacattctaaccattttgaaaattccctctgtgacatgtatgccaaggatatagctaataaaaattcaaccagcaattaattaaaaaatttgcagaaaaacataatgttagtatataattgtgcatgttggaattttatatagcaattatattatttaagaggagatttagtcgtgcaaggtagatgttattattgtaataaagaattaactgaaagaacaattaaaagacatgcaaagagttgttcagtaatgaaaaaatcaattgaagaaaaaatgaatcaggctagagaggtaagagatcaattcataatatccatgaaagataagtataatcctagtttatattgtatttatgtttctatagatgcaaagttgcagcttcagcatttggacaaatttataagagatatatgggtagaatgttgtgggcatttaagtgcgtttcatattgatgaagaaatatatcatgataatagtgatgaacaatatgagatgaatttttatttaaaagatgtattaaatattaataaaaagttcgaatatgaatatgattttggttcaactacttatttgactttagaagttgtagatataatacaagtcccaagtgaatttagccaggtggaagttattgctagaaataatccggaagaaggtaagtttaataattctccaagagatggggtttgtgggtatataggaaataaagatgcagaaaaagaatacttgcctggaaataataagaaatacaaagttagcaataaaaagccgatacataacaatgatgcattctcagattttgattattctgaacaaatggtagagaatgattttttaaaacattataataaatttacaaatagttttatacatacgttttttaaggagacatattcttttgagctagaagaattgatcaagccatatcctaaaaaggaaatttgtagtatagcagaaaacattggtcttaaattatcatataatttaaataagaatcaggtaattgaaagatatattgatgaatatgagaattatattagaaataaaatgcatgtgattaatgatgatatgtataaaatattattaaaatacattaagaataatggaataatttcgatttctgataatgaagcagaaaactatgcggataaacatgctttttttatgaatcaagggatggtatttccttgcttaaaagatagaaaaccaatcttattaatgcccgaagtaatgcaggcaattgttaagcaaagtgatactttagagtttagaaagttaatgaagaaaaatagtgaaatcatgaatatctttagaggtatgattaagttatatggtgttctttgttttgaagatgttaaaggattaatgaaaagatatgacaatgtagaagagcaagtattgttatctatattagaagaaggatctttttattataataatgaatattatggtacaattgatgatgatggaaaaattatattcgttaatgtagaaatagaggattatgaagaaatattaaataatatagacaacaatttggattattttatgattagtaaagatgatctaatctccatgtctaacgaagattatttggaaagaagtagtattgggaggaagttttcaaaagaattttcatctatgtttttagttgataaaaatgatgctgctggaactatgaatatgttggctttggatatacaatatagaaattctgaagaaatacttgaagatataattaatggaatagatgcaaaacttgacaaggaagatgaaattagggtatttaacattgttaataaatttattaagaatataccattatggaaatataaaggtgcaactataaatgaaaaatcaggaaataataaaacaattgaaagcaaaaaagaggttggaagaaatgatccatgcccatgtcaaagcggaaagaagtataagaagtgctgtggacgtaatggaaaggtgattcaattgttttaacaaatttaaggtatacaaattaatgatgtatggaattttgtataatgttgcttttagataaatatattaacattattttgaatatagtacgaggaataaggagttattaaagatagctccttatttttgagtaaaaaaagcaaatagtgaattaaattaaaaaaagtataaaaattcgacattaaaatgatatttgggtatgatataatattactgtggatatataaggaattactaaagggttttgtaaaatgaataaaattatggagaggatggtgttttgtattatgtttgatattaaaaagggattgaataaattctatatcggagaaacagaagaaaatacgttagcagaagtaatattaagtgatactagtaaggatataataagaattgagcatacttttgtaggtgaacagttgaagggcaaaggagcaggcaaacttttaataaggaaagttgtagattttgcgatagaagaaaataagaagataataccagtatgtgtttttgcaaaaaaggaatttgataaaaataaagagtatgagagtgttttatataaaaacgattaatgggtttaaagaggtgttatatggagaaagtactgaagaaaaaattaaaagtaggtataagtgaatgctgttttggagcaaaagtaagatataatggtaaaggatttgattatgtaaaaaattttggtagggaaaatgagcaatttgtattttatcctatgtgccctgaatgtcttgctggattaggggtacctagaacacctataagcataaagggcggtagtggacaagatgttttagaaggcaaggcaaatattaaaaataaaactggtgaagatgttacagaaaagcttataaaaacatgtaacttttgtttagaattattgaagagtgaggatatatatatttatatgtacaaggaggggagtccaagttgcggagtatataggactactcttaaggacaaaagacttggaaacccacctggagtattaggggcgatgttgcttaaagaaggattctttttagtatgtgcagatgatttagaaagcccagtaaaaaggtgggatataagaagaagattaaacgcttttgtttgggcaagagaagtagaaatagagaataaaaatcaactttataatgtatggcatgctctaaaatttttatgtcaagaattagatgagaaggcggctagaagtttaggaaacaagttatcaaatttaaacgatactcaaaaagaagatattgaaaaatacagacaaatgatccttgatattattagaaagccatcaaatttaagtagaataaaggcatggttatggaaaaattatagctactacagaaaatataaaggtatagaacttgatatagtgaaagagccaacagatctaagatcaaatacaattttggctgaagaactaattaagctagaaaacaaactatataatgaagggtattcctttggatctagtccaattctttatagaggaaaaagataaaaatatgcacattgtgtataaaaatgtagaaataaaggttatgaaagtaagaaagaatagaaggaaaaaaggatatagatgttgaaatatatataataaggtaattaacctaataaatatttattgaaatgatagtgaggagagagaatttatgaaaaaatttgtttgtacagtgtgtggttatattcatgaaggagaagcagcaccagaaaaatgtccagtatgtggtgtaggatcagaaaagttcatagagcaaagtggggacttagcgtttgctgatgaacatgtaattggagttgctaaaggtgttgagaaagaagtgatcgatggattacaggcgaactttattggagaatgcacagaagttggaatgtatttagctatgtcaagacaagctgatagagaaggatatccagaagttgcagaagcatataagagaatagcatttgaagaagcagaacatgctgctaaatttgctgaattacttggagaagtagtagtggcagatacaaaagctaatttacaggctagagttgacgcagaacatggcgcatgtcaaggtaaaaaagatttagcaacacttgctaagaaattaaacttagatgcaatacatgatacagttcatgaaatgtgcaaggatgaagctagacatggaaaagcatttaaaggattgttagatagatattttgaatagagcagattactaatgatatgttcttattaagctaatttatacatattattagaaagcgttcataaagagtaaaaaagtcagattaggttgagaacttaatctgacttttttattctttatgaaattataactaagtccaatatatgaataacttttaaaagtagcagaaatatatagtatggaaagcagattttctaataaaaatcgtgtatccttataaataataaaattagtatagtaaagtaattttaaaatcagaatattattaaatatagttcatattattaaaaaaaagtagattattaaatttacaaaatttctaaaatgaattaagaaaaagcgcctattcaaaaaatataatataattaattcgtatatatagttgttattattttatagcctgtgcaataaagaagcgcttaaaatattattaagtaagtagaattaaaataagtaataataatttttttaaaattaattatatatttaattttaagtttagatacagtaataaaaacattgaatagttaaaagatcaataatagaattatattacggaaaagaatgttgaaatatggaattaatgtttttaggtgttagagtataatatagattattaatcatataaatctgaacttttttgtgttttatgctggaggtggtattattaagactacgttatttatattattatttttatgttgcgttttttatttatttttaggaatatacggctataggatagataagaaatccaagacaaatcagatatttttatatatttgtatttgctttgtactttggtcaggtggatatgcaatgatgttgacatccgataacatcaatgtagcatttttttggagaaattcttcggttttagggtattgtttttttaatggactttggctatactttgcatatttactaaataatacggatgattttgagtatatttcaataataaaatttttagcatatgttccaactactctattatttattggaaatgttatagtagaaccgtattcagcaatgactaatgagtattatggttggattgatgttgccccagagttgcttccacagattctatatataatatgggcgatagtaatagatattgcaggtgttgcagtgctgtatctaagaggaaaatattctaagaagaatagagtaaaaaagcaaactaaagttattttaataacttgtacagtaagtattattataggaataattacagattttgtcttgcctttactaggtgtaactatttttccatcagcagtattaacaggagttatagctttaggagggatctattatacaataaacaggcacagaatgatgttgactactccaaaatatatttcagaatacatttttaacagtgtaaacgagccaatatatattttaaatgagaactttattattcaaaattgtaatgatgcatcattaagtgtaactaattataaaattgaagaactcgaaggaaaaatatttagtgaattacttaataatgttgattttgacttaagtgtcgtaattaaaaatgcttatgcaaaaaatatagaagttaacttggaaacgaaatatggaaatagcattacctgtgaattatccggcacaattatatatgatgaatatagagatatattaggcatattgatattactacacgatatttcggaaagaaaaaaaatattagaaatggaaaagagctgcaatttaaaactagaagaagccaatatgatgcttaaaaatcaaattcaagataaaataagggctgaggagaaaattcgtcattttgtatattatgatcctcttacagaacttcctaacagaaaaatgatgttagaaaggcttaatctgcttctagaaattgaaaataatagttttgcgatgcttttcatagatttagatggatttaaaagtataaatgataattatgggcatcaacttggtgacaaagttctcaagaatgttgcagacacattaaaaggtataataagtgataatgatacaatcagcagaattggtggagatgaatttgtaattatagcaactaatataaaatccactacttatgttaaagaaattgctgagaggattcaaaaagcattgaacactccttttatttataatggggaagctttaagtgtcggagccagtattggcataagtatatttcctgaacatggtaaagacacagatactttaattagaaaagcagacatagccatgtatgaagttaagaaaaatggtggttataattatgctttatattcatcgaaaataaatgatgaatttcttgataaaatcgatatcaaagagaaattaaataaagccatgaaaaacaatgaatttataatttactatcaaccaattataagtttaaggtcaatgaaagttctatattcagaagctcttatcagatggaagcaaggtgataaaattatttctcctgcagagtttattccaattgcaaaaagtgtaggtgaaataataccaattgataattgggtattagaaaatgcttgcaagcaatgtgaaatatggaatgagcttggaggcaatgaatttagtatttcagttaatgtctcttattcacaattaaagcaatctgagttcgtatcaatggttcaaagtatattgaatcattactcgattcaagcaaggtgcttaaatatggaaattactgaagatgaggctatggaggactttggcacaattataggaatactagaagaattaagaaaaataggaattagagtatctttagatgattttggtacaggctattcatctcttagttatgtcaatagattacctattgatatgataaaaattgataagtcacttatagctaatttagagaaagactataaaagcgtaatgattgttagatcaataataaatttagggcacagcttgagtcttaaaattattgcagaaggaattgaaacacaggaacaatttagaattttaaatgaacttaattgtgattatattcaaggctacttaataggaaaaccaatggaagcattagagtttgagcatagatttattaaaaagaaactgaaattatgaaatcataaaaattagaagtattttactaaaatatgacatagatatgagatctatccgtatgctaaaaatggatagattcttaatttgcagagatgaatatttggggtgtaaaattcaagttatggaatatttattaaggagatttaaaaatggagacaactatttattattttactggaacaggaaattcgcttaagatagctaaagatttaagtgaaaatatcatcaattgtcgattggtacgtatatgcaaacgtaatatgaatataaatgaagtaacgtctaaaagggtaggctttgtttttccagtttactatagagggcttcctaaaatggttgcaaaatttataaaaaacttagaggttaattcaggtaaatacttttttgcggtagctaattttggaagctatgcagcattaacctttgaacaaattgatgctatattaagacgtaaaggaaaatcgctttcagcaaattttagtgttgaaatgcctggaaatatgtggtttatgtattatcctcatccgaaagaagacttcattaatcgaatgaataatcaatcaaagataacaattgatattgcaagaatgattaataataactatgaaaataatattcctgtcataaaaaacagagataaagaagaaaagatgtatagagattttaatccaaataacattgacgaaaatttctgggttagcgagaaatgtataggctgtggcatttgttctaaggtatgtccggctgaaaatatagaaattatagaaacaaaaccttcctggaaacaccgatgtgaacaatgtctagcatgtattcacttatgtccacaggcagcaattgaatttaagaaagattcaataaataaagaaagatataaaaatatatttattgaaatgaaggagctcttttaaaatctatttccttaagtttaaatttcaaaggatgcgctggttgtttagcatgtgtttagataattggtactaaaaacaatagtaatgcatacaatataagtaaatttaaagggagagactaatggatataagtgaatacattgatattttagactatttaattataaattagatatagaattactagctgtttcatttttgtttttaggaggaagagcatggatattgataagatattttataaaacattatttaagaatctgtttagcgatcctgtagaaataaaattttgggatggaactactgagaaatatttagaaggagaacccgttttcaaaattatttttaatgaaccaatttccaaagctgatattattaaaaatccatcattagcctttggagaagggtatatgactaagaaagtagatatagagggaagtgttaaaaaagctatagagtctatatataataataaggatagctttttgaataatagtaacatgtattcaaagctcctaagaaaagcttcaaataatatcaaacatagtaaagaaaatattgagtttcattatgatataggcaatgatttttataaactatggttagacgatacaatgacatattcatgtgcgtatttcaagacacctagtgattcattgacacaagcacaaaagaataaggtgctacacatccttaataaattggacttaaaagaaggagaaactttacttgatataggatgtggatggggtgaattaattatttctgcagctaaggaatacaatgtgaaagctactggaataactttaagttctgagcaatttgcaaaagttaaagaaaaaatagataatgagaatctgaacaatctagttgatgttcagcttgttgattatagggaatttaaagatagacaatttgataagatagttagtgtaggtatgttggaacacgtaggaaaagaacatattactgaatattttaatactatagatagattattaaatgataagggattatctttacttcattgcataacatcagtaacagaaggtggaaataatacttggatagataagtatatttttccaggtggatacgttccatctgtttcagaattgatctgctcaatgtcagataaaaatttcaatgtaattgatgtagaaaatcttagactacactatgaaaaaacgctagaacattgggcaagtaattttgaaaatgctttacctgaaataagaaaaactaaagatgaaacatttataagaatgtggagattatatttaaatgcctgtgcagcatcttttaatagtgggaatgttcatatacaccaatttttatttggcaaaggagtaaataataatttacattggactagagattatatgtataagtaatagtatataaaagtttttggccatattttataatgaattttttattagcataattcattataggatatggctttatatatactgcaattcacaatgaacatttcacaagccacaattacggctaaaatttttgaaatatttttagaattatgatgaagaattatttttgcgtagaattcttttatttctaaataattaatttgaataaattttatatttatatgcaacctaatcaagagtagatatataattttgagtatttatgtctaatgggaggcattataatgaaaatattaaataaaagaattgcgacgatattatttactttaactattttttcattgatatctataactcaagttaaagcaatagcagatttaaatcctaacactggtagactgtctaatatagccgtaatatttttcgtaactgatgatccatttactatgaaagttattgaaagcttaaaaaatatagaaaatgagaatcaaaatagagtgaaatttacttttttggatccgaagaataatatagcaatacaagatgaactattagatgctgcgttacaaacaaaatatgatttgtttatattatatttaccggacagaagagaaaatgttgtagaaggtgttattaacaaggttaaacaaaagaataagcctttaatattaatgaatattatgcctgaagtggcattaaaagcttctaaattatatgagaaagtcgtttttgtaactcctgattcgaagaaagctggcattgctcaaggtaaaattattgctgatctttggaatagaaataaaagcagtttagatacaaatggtgataatatattacagtatgttttgttgcaaggtccatatgatgatccacagaccattgatagaagtaaatatgcaatatcaacactcaatgattctggaataaagacacaagaacttgctagagtaaatgctaattggtctaaggatttaggtaaaagttctattgataatttgctccttaaatataatggaagaattgaggcagtaatttcaaacaatgatgctatggcaataggggctattgagtcattacaaaaatatggatataacaaagataataagttaaaaagtataacggttgttggaattgatggcttgccagaagcaaaagatttaattgataaaggaatcatgactggaactgttattcaagatccaaggattgaagctgaagttttatataatgttggaatgaatttaattaaaaatttaagcccaacagaaaatacagattataaagttgttgatggagaaattataataccatttccatatgatacatatatacgtagcattagttaatcataaataggaaagtttttaaaataatccttacacatgaaatagttaatgaacttttttagagtaatatatttcttaaattctttcttgagactatatattaaaatactatgatatacgtacttgacacttcctgatgcaaaagaatttaaaaatttgcatgcaagtaaagcattattttaagttaagctggtacttttgctcaaaaaataccagctttttgatagggttacaagttattgattatttaacaactacacctacaccatttggaatgactacaacatctgcatctttaccttttatgtcatatgcaatgcttaatgcttcatcaaaagtataagcgtgtttcatatgcatgctcttaatcatattcggatcacacatatctgtaacaacgattacagtatagttacataaaattcgtgttaaaatttgaatctcccactgatcaggtattgtttcatttctaggaacttttaatatttgttcaagaagttcttcaggtgattttgaatttgctatagtttcgtaaaaagattggccaccatgtccatcgttacaagcggctatcataataattactccacctttcttacatgtagcttctgcagctgtcataccctttacagcttggtatatattttgatctagtggatatcccccattacttgaaattgcaatatcagcttgtatactttttacactagaaagctccataacaaacttgcaaccttcctcatgggcaagcttactgtcaccagcaaaagcatttataatgtttttatcttcatctataaccacatttagtataaatgcaagatttgctttttcagcagcatagagcatatctttgtgtataggattatcttttataattccagtccttgcatgattgctgttaataaattcagaacaatgattggccattatggtttttgctgaagctattccaggtaatatgctttttcttccgccagaaaatccagcaaaaaaatgtggttctataaaaccttctgctattaggagctcggtttccatcgctaatttatttaggaataactcaccaccagaaggtagtgttcccacatttattaaactactttcatctgttgaaatatggtttataatctcttcgttatcaactatggtttgtccgaatttatttatcatttcttctctagttgttggtctatgaaagcctgtggctataagaatttttatgtttatgttgggattaacgtttcttattctttgcaataaaattggcatggtaattttactaggaacaggtcgtgtatgatcactagttataataaccatattatttttaccaagtaccaattcctctaaagatttactacctatgcaattatcaagagctttattcactatatcattttgtgaaatatcagctttataggtatttgccttggaaactaaaatgccctttagatttttatcgtcaatgtttatttttaaagattttgttgagtatggaatctcgatcgaagccataaaataacctccctaaataaaaataattgtatttacactaaaattataacatacattgctataattggtaaggccaatttaaatgttttcataagttgggcaaaaattcgttataaatatttttttaggaatttatatatgtatttatttgattgacagagaaatgttaaaatatatacaagttctacttatagattagtagaataaaaaatcaatttactagtcaatcatcgaatatatatattcgatttatgagtttataaaaaactaaaaaaagaaaataggaggtaggttatgataatatttgaagcatgtgtggggaattatgatgatgcaattttagctgctaaaaggggagcaaatagaatagaactttgtgataatttgattgagggaggaaccactccaagttacggaacaataagaaaaattgttgaggatctcgatataccaataatggttattataaggccacgtggtggaagttttacttacacaaaagaagaacttgaaataatgaaatacgatgtaaagatgtgcaaagaactaggagttcacggagtggtaattggtgctgtaaaagattctgaggtggataaagaaataatagaggagttagttaatttggcaaagcctatgacaataacttttcatatggcatttgacgaagttgaggataaaaagagggctgtagatgaaataattaagttaggaatagatagaatacttactaaaggcggatgtgaaaatgctatggctggaaaagagtgtttaaaggatttagttaaatatgctgacggtagaatttcaataatgccaggaaaaggaattactaaggaaaatagagattttctcttagaatatacaggtgcagttgaaatacatggtactagagtagtttaagattatatataactatacaaaaagcagagtttttttaacaatactgtattaaagtcagagggttttcgtaaattcaatacattatggcaaaataaacatatttaataatgtggaaaaaatagtaaaatgatttataatataattgttactaacgattatttatagagttttaaataatatatatgttgcaattcacatgcacaattcacaattacggctaaaattcttccaatattttttgaattatgatgaagaattatttttgctacatatatattattaaactaatactggggggagaattttgctggaaaataaaatactggagttaattgaaaatgaggacaaaagaaagccattaaccgacagtgatattgctaaattagtaaatacgactagagaatatataactcaatttagaacagaaaaaaatataaataattctcgccaaagaaaagaatcaatcctatatagtgatataaaaaaaataattattgaagataaagatatttcagataggcagttatgcaaaaggctatctattcttggatatgatatttccagatattcagtatctcagattaaaaaaaatataatttcagaaatttttccgcagaatgttgctaaaaaatcaaatttaaataaagagcaatcgaaaaattttataacagttaagtcagcagttgataaagatgggacggaaattaataatagtcccaatacagataattcaaataatggcgataaaagtaatactaattatttaagaaatattataggatatcacggttcgttaaaaaatgcaattagtcaagcagaagcagcagtgttatatccacctcatggtctccatactcttttacttggagcttctggtgttggaaaaagtttttttgcagaagctatgtataattttgctattagttcttcgcattttgataagaatgcaccctttgtactttttaactgtgctgattatgtagataatccacaattacttctttctcaattgtttgggtacagtaaaggtgcctttactggcgctaatacggataaggttggcttagtagagaaagcaaacaatgggatactattcttagatgaagtgcatagattaccaagcgaaggtcaggaaatattgttttatctgttagataaaggaaagtacagaaggcttggtgaaactgaaaatagtaggacagcaaatgtgatgataattgcagcaacaacagaagatccaaaatcatccttgctactaacattcagaagaagaattccaatgataattgaacttccatccattaacaataggcctgttaatgaaaaatatgtactgattaaaagttttttttcacaagaatcagctagagtgagaaaggaaattaccatacgatatgaagtcatcagatcgttattgttatacaattgtccagggaacataggacagctacgaagtgatatacaagttgcatgtgcaagaggtttttgtaattccttaagcaataattcaaatgaagttgttatcgacataaaagatttacctaagcatgttcctctagaaatattaagtgttaaggatagagaattagtttcagaagatatttttaatgaagatttgattgttaatcctaatgatgttgtaacacagaagtctaaagatgatagatatatgttaccagatggaatatatagtaatatagaggaaaagtattataaacttgaaaaacagggactaagtaaagatgagattaataaaatactgtggaacaaagtggaattcaatttaagtaagtttgcaaaaaatatagaatcaaatatgttttttccaaaggaagaactaaaaaatataatagatgaaaaaatattaaatgtggttgaaaaagtaactgatattgcaaaacaatatatagaaaatatccaggaaaatttttattattgcgtagcaatgcatttgaattcaacttatgaacgactaaaacagggaagaataataaggaatcctgaatcagattatataagaaaggaatattataatgaatacaggattgcaaaaatattaactaaagaaataaataatagcttagatattcaacttccggaagatgaaataggatttattgccatgtacctaaaaacgttttctcaggtggataaaaatgtaagcagagtggctgttattgtattaagtcatggccatgttgcttgtggtatggttgatgtagcaaataaactattaggtacaaatcttgcagttggaattgaaatgtcactagatgaaaatcctcaaattttacttgaaagagctatagaagtagtgaaaagagttaatgaaggtaaaggatgcttgatactggtcgatatgggatcactggttacatttggggaaataataacaaaagaaacaggaattccaactcgagttattggtagggtagatactgtgatggtattagaggcagttagaagatcattaatggagaatagtaacttatacgaaatttctaaagctcttgatggagacaaggcttatgttggaaaagttaaagggacgaataaatatactaaaactataattacattatgtataacaggtgaaggaactgcattaaaaataaagaaatatcttgaagatgtagtactaggaaatacaaataagaacttaagaattatatcagttggaattataaataaaaataatgctcaagatgaaataattaaaattagtagagatcatgatatagctgcaatagtcggaactatagatccagagttagaaagcattccatttatatcttttcatgatattttaaaagaatcaggtaaattaagattaaaagaattcctcggaataaataagaaacagtttaatcctttaataaatgtcattgatgaggaattaataaaagttaataatgatagttttaccaaaagtgatttaatagatgagatgtgtagtcttcttatatcaaaagggaaagttagtgagaattttacaatgagtgtgtataagcgagaaatgcttggaggaaccttgtttgaaggaatatttggaatacctcatggcctatcagaattcgttgaaaaatcatctatagctatttttaaacttaataatcctattttatgggattataattgtatggtagacgttgtgattatgttagcacttaaagaaaatgatgggaaagtggttagacaattatttgataccttatcaaagacagaagtagctaataaattaagaaaatcaaattctccgaaagagatttcagacatattattaaaaatctaacaactattttaagttacaaggtagaaagtaaaaattttatcttgtaactttatatttttaaatatatattaccttttcaacatagttttggcacggcgattgctttagaaatattgtgaagatgtaatcaaagataaaaaagtataaaaactacatcaagtaaagaagaagtatgaccactagaaatattaaagaaaatttatagtaaaagaggaggtagtttaatgacttgaagcattgagaaactcttgagaagaaatttagaaataaataaccttgaagataaattaaaagctgattttaaaatatatattattaccttttcagcatagttttggcatgataattgctttgtaaatattatgaagatgtaatcatggatgaaaacgtataaaatacttacaaaaaaggaggaagttaaatgactagaagtattaaagaatttttaagaagagatttagtagtaaataatcttgaagctaaatcagcagaggatgtctttaagaagatatctccaatattattagaagcaggatttgtagaagattccttttttaatgggttagtaaatagagaaagtaaatttcctacaggtttattacttggaaaatacaatgttgcaataccccataccgataccatacatgttaagaaaccagcaatagccattgcaactctaaaaaatcccgtaaaatttaatagcatggatggaaatggaagtgtagatgtcaatatagtatttactatggctttaaatgaacctcatagccagatagtaatgttgcagcaattaatgtttttaatccagaatgaaagcattctcgaaaatatgcttcaagcaaaaaatagcgatgaggtgtatgatatcgtttcaagctttaattgtaattgtgaataattaatgagcaattatttaaattatattattttaaggaggcaaaaaaatggacaaacaaaaattaatattagtagcttgtggtacaggaatcgcaacttcaacagttgtatgtaaaaaggtggaagacttgattaaaactaatggcattaatgcgagaattatacaatgtaagatttcggaagtggtaggttatgaagatcaggcagatcttttagtaacaactacaatttcatcaagaaattataaatttcctgtaattaatgctatgaattatctgactaacattaatcctggaaaagttgaccaaggaattatagatgctttgaaataaaaaagataggccactttaaaggtggacctatataaaaaattaatttgactactaattattataacacataaaattatgcatttgaagcttatgacaacacatattaattaatagtattttttattctctagtaaattatattgatggacaatctgtggataacttataagaaaggctaatttagaaggttgacttttaaaagagaataaaaaagaaaatatattcgcctgccagatttttctcacatgcgttcgaaaaggcagatgcgtaaaaaaatctccggctccacagtcgcctgcgattttgttcttcaaaaactaaatcgtatatgtaaatttatgatattaacagcttaattggaaatttataaaagtaaatgaaatttgataatatagggggaaagaaaatgttattaaatgtagtgcaatacattttgaacttaggaccaactgttatgctgccattaacaattactattatcggtattatatttggacaaggatttaaaaaagcatttagatcaggtattacaattggtattggttttgttggtataaatttggttgtcggattgcttacaacaaatcttggtggcgcagcacaacaaatggttactagatatggattacagctaagcataatagatgtaggctggccagctgctgctgcaataagttgggcatctcctatagcagcaataatgattccaatagccatgttagtaaatttagtaatgctagctacaaaggcaacaaatgtagttgatattgatatatggaattattggcactttactgcagctggtgctagtgtatacgtattaactaatggtaactggctatttgctattttggctggtattttatacgaagttgctgttattaagattgcagataagacagctccaatggttcaagaattctttggacttgagggagtatcattaccaaccggctcaactgctgcatgtggtctaattggtattcctattgtcagtgtagtaaaaagaattccggggataaaaaatttaaaagcagacccagaaactattcaaaaaagatttggcgtttttggagaacctatgatgatgggacttattcttggtattgtacttggaattcttgccggctatggtgtagataaaatcttgcaaataggtatttcaatggctggtgtcatgttcttaatgcctagaatggttagaatacttatggaaggtttaattcctgtttcggaatcagttagagaattcttgcaaaagaaaaattttgggaaagatagaaatcttacaattggtttggatgcagcagtagcagttggacatccagcagttattgcaacagcacttgtattagttcctattacattattcttagcagtaatactacctggaaatcaagttctaccttttggagatttagctacaatatgtttttatgttgcatttatagttggtgcggcaaaaggtaatatagtgcactcagttatatcaggtacaattgttatggcattaggattactaatggcaacaaatattgctggattccatactcaaatggctcaaatggctcagtttacaatgccagcaggaacatcaactatttcaagcttagatatgggtggtaatttcttaaactggatagtaattaagatattccaattattcacaggaagtctataaagtgaaacttagctccagagggagttttctaggtgccccttgagggtaaacctccaactgagggttagttgaacttataccctcaaggggtacacagtttagggtcgtgccactgttatctctcactttaatagaagatgggagtgttacagtggctagacatcagataagattaaataatctaatttgttaaagagtgcttattagtactctttaacatcattggttatttacaaggaaaggatgatggttatagtggaagtaataaatttaaaagttgaagaattgattggaatggattttaagtgtgaatgtgggaaaaggcatagtgtagaaattaattctgtaaaaataggaagtaatataatagaacaactcccagaattccttaaagagtttaagaataaaaaaatattaattgtacaagatgtacacacatatgatgtagctggaaaaagagttgaagaaacattaaataatgattttttattaaagaaatatgtgtttccacaggaacatttattacctgatgtatatgctcttggaagagttttaatagaaatagaagatgatacagaacttatacttggtgtaggctcaggagttataaatgacatctgcaggtatgtggcttacagagcacatgtgccttatgccatagtatgtactgcaccatcaatggacggttatgcatctgtggtatcgcctttaatcacagatggatttaaagaatctcataaagcagcatatgcttatgggatatatgcagatattgacattatgaagaatgctccaatgtatttactttgttcaggacttggggacgtattaggtaaatatactgctcttgcagactggtcaattacaaacctcttaacaggagaatattattgtaagactattgcagatatggttcaatccacagtagataagtgcgttgctgctgcaccaaggattccagaaaggaatcatgaagtagtaaaaaatataacagatgcactagtcttgtctggaataactataggaatgtcaggttcttcaagacctgcatcaggttctgagcatcatattgctcatggctgggaaataatgtttcatacaagaaatagtgaagaaaaatgggtacatggaaactttgttggagtaggtacggttgtaatgtctatattatttgaagcattaaatgatatagatatagaaaatgttatggctaagaaaagcttcagacactatgatatgaataaatggagacaaaatattgaaagcgtatttggtaaagtggcagttaatgtaattaattataaaaaggatgcgattgaattagatcctgataagagacaagaaaatgcagaaaagatagcagcaaactggaaggaaattcttgatattggacagactatagtgccaagttctgagaatataaaaaagatactacaggacagtggatgtgtatggcatcctgaagaacttggaatagacagggatttatttattaggacttttattgctgcaaaggacataagaacaagatatggcgttgtgcatttaattgatgatcttggattaacagaagaaattgctaatttaattgctgataaattatataaggcacaatcaaaaaaataacaaattcacctgccaagcctattttccatcatgcttcttcagaagattgccctaatagacttgctatgagaccaatctacttccttgcctgatgaaaaataatcatggcattttggacttgttattttctttcatgtgcctaaatccaacaacatataagacaattatatgttttaatgtggaggtaaaaatgaatgagttaaaagatattaaatgttttttattagatatggacgggactttctatcttggaaatacaattattgatggagctttagactttctagacattttaaaaagtcaacaaaagaaatttatattcttaacaaataactcttcgaaaaacaaatcaacttataagcaaaagctttcagcacttggttgctatgttgatgaagaacaaatttacacatctggtgaagcaaccatatggtatatgaagaaaaactgcataggtaacaagatatatctcatgggtacagaaccacttatgacagagtttgaaagggcaggttttatattagttaatggcaaaaatgacaaaccagattatgtagttcttgggtttgacactacactaacttatgaaaaaatatggacagcttgtgattatctaagagatggagtaccatttatagctactcatccagattttaattgtccaattgaagatagcaaatatatgcctgatactggatctatgataagaatgtttgaagcatctacaggtatttctcctgtggttataggtaaaccatatggatatatagtagaagctatcattgaaaagtatggccttaaaaaagaagaagtggcaattgtaggagacagactttacactgacattaaaactggagtgaatgcaggaataactagcattcttgtattaagtggcgagacatcagaagctatgtataaagaatctgacataactgcagattatgtattctcatcaattaaatatattggtgaagagttgatgcaattttatgaaagctttatttaagtcctagatgattataagaattttatctagccattgtatgtttagaagaacttatttagtagctgtatgttaaaaagtattgaaaattcatggaaaataattaaattctatgagttttgagaaattaaaaagaagttaatattcaaaattaggaggtaatgttatgagcattataacaattattggagcaggccaaatggcatctgcactaacttttccagcaacagaaaataataataagataagacttgtgggtacaccattagatagagaaatcataaatactgcgaaggctacaggttttcattcgacattaaaacgtcaattacctgaaacaggaattgaatactatcaaattgaagatgtaaatgaagcaatagatggagcagagcttattatttgtggagtcagcagctttggtgttgactggtttgcagacaatatattacctattatacctgaagagattcctgttctttcaataacaaagggaatgattactgaagaggatggcaaaatgataaattatcctcactactttttaagtaaacttccgtctaataagaaactttctattagcgctgtaggtggaccatgtactagttatgaacttgccgataaagataattcagaggttgtattttgtggtgataacataaacttacttagaaagtttaagagtttatttgaaacttcatactatcatattagcttatctacagatattataggtgttgaatgtgctgtagcgctaaagaatgcttatgctttaggcgtatcactagctattggattagctattggagctgatggatctggaaaggaacattacaattctcaggctgcactttttggacaaagcataaaggaagctaagcgccttttggaaatagtcggaggaggagaagaaaacattatatattttggtggcgacttatatgtaactgtatttggtggacgtactcgtagaataggaactttattaggacaaggattttcatttgaggaagctatggaacaattaaaaggagttacgttagaatcagtagttattgctactcgtgctgcgaaatacgtacgttgcctagcagaaaaaggagtagttaaacttagtgattttccaatgataactcatattgatgagatcataaattcaggtggtaaggttaatattccatgggaagcatttgagtctgaaaaaatattatgatttatcattaactaactgaagatttagagtgttaagtgtattaactctaattaaaattctaaagttaaattatcatgattataaaatgaacgtgtggtaaatattattgatatcatattttgagtacagtactagatttaaacttagtgctgtacttttcataagcttcttttacagtatatgatataatctttaaaagataagaaaaataaattcattatgttttctatttttataaaattgttattccagttaaagagagttagtgttataattacataagaaaattgtgtaaaaaagtgaattaatatacatgtatgtatattaatttctttttgtttactatatttcatagtaactcataaaattttatttcgttagaatcaaaattccatttaatttaagataagtttctatgttaataacgctaatacatatttaatattaccaatacataaagtttttttattagtaaagtagggaagaagtttattttaatgagtatatattatttaatcactttttatgaaaaagcatacatttatgatgtatttatttgcatacttcaaaaaagtgttcttaatagagcctaaacatttatttctaaagacataatatctatatatgatatttttagagtatatgaatttttagaacttatgcatatctttaattttatagatggtgagatggtattcgatatagtttgagttactgattttctttttcagggggtagcaatatatgtttcaatgcgaatgcgagcaagaagcaagttatattatagaatcaaaaaagaaatgtcttgagttagggttggactctaataatcctaaaatgcctaaaaatattatgtctgaattagaattagggaaaaaaagagatgcttatgacgaaattctagaagttgtcaaatttttcagtaataaaatgataaaattgttagaaggtacacctgtattaataacaattacggatgaagatggatatttgctagatgttcttggagataaatctattagcgaaacaatgtctgaatttggagttaaaccaggtatacaatttcgagaagaggaaatgggtacaaatgtagttagcttaacacttaagcagaatcacccaatacaactaataggaagcaatcactatcataaatgttttcaagactgcgcatgttatggagttccatttcattattcagatgatggtaatttattgggaagtatatgtattatgactgcgattatacttcataatccattttttttaatgacattaactactgtagttgatgcaatagagcgtgaactattgctaagaaagcaaaatcgaaagataactgaacaaaaagaattgttgtatgaatcagaaaagagacaaagagagtttcttgaaaaagatttagcaatgaaggatgaatttataactttaattacacatgaatttaaaacgccaataaatgttatttattcagctatacaattgattgaacatgtgtatattagtgaaattcctgaatcagtgaataaacttattggaagtataaaacgtaatacatttagacaattgagacttgtgaataatttactagacattacaaaattaaaatcggatcagtttaaattaaatttgaaatatttagatattgtatctttaacaagattaattacagaatcaataaaagtttatgcggatcaaaagagaattaatctttattttaaaactaatgttaacaataaaaatatttcaatagatgatgaaaaatatgaacgtataatcttaaatttattatcaaacgctataaaatttacaccggaaggaggctcaataactgttgagtttaaagaaaatatcaataataaaacagtagatatatctgtaactgatacgggggttggtataccaaaagagaaacataaagtgatattccataggtttggacaagttgaaaataatctttcgaggttagcagaaggtagtggcattggattagctcttgtaaagatgttagtaattatattagaaggagaaatagaagttgagagtgaggttgggtgtggaagtaagtttaccataactttacctattaaagaggatatagttaatgaagaaagtaaaatatcacaaagatatgataataggttaataaatgccattaatgttgaattttctgacatatatttctgataatatttagatatcatttcatttttgattatgaatataaaaattagaaaaagtataaactaaaaatgaggtgagaaaaaatgacaaactataaatttattacaaataatgatgaaaatgattcaacaaatacaacaaatacatctatgccagcaaaaaataggaaaagacataaacctgtaagagggattcctagaactggagtataataaatggcaaccataagtttgtagaatcaaaaaagtgcagtactaaaaaatatattttggtactgcactttttaagtttatataattataatctaatcactttaaattaagaatattttttatattaaaacacatgataaatttaaatactataacttaacgaaaaaatatggaggatcggtaatgagcgtcttaaaaaaaataataatatttataattttaactttattaataattacatcactagatacttcaacaaaaagtgtatatgctatcccaaatttaagtaaaaacactcctattaaaatagcagtattttcagataactctagcgctatgtatatttctctccttaaacaaaatttagaacgtattgaaaaagaaaatgaagacaaagtaaagtttacgttttttgatgctaaagacaatcaagctaaacaaaatgaaagcatagagaaagctctttcgcaagactttgatctttttattataagtataatatctccaaatttaaaagatgtagaaagtactttgcgcaaaataatggaaaaagacattcctataattttgaatcctgatccagtacaagaaataataaactttgttaaaccatataaacgttttgttgttgtcggcgcagattttgaacaatcaggtacaatggaagggagcattcttgttaatgaatggagagctaataagccaacaatagataaaaatcatgatgatgtattgcagtatattatgctaaaaggtagaattggaagtcctctaacatcattaaggacaaaatactcaattttagcgcttaatgatgctggaataaaaacagaggaacttgcttctccatcgtgtgaatggatggaagattgtgcccaaagtgctgtggagtcattatttcttaaatatggtgacaaaattgaagcaatagtttcaaataatgatgcgatggcaataggagcggttgaagctttgcagaaatatggatacaacaaaggcggtaaatctaaaacaattccagttgtaggtatcgacggcatgccgactgctaaagatttgataaaaaaagggtttatgttgggaaccgttgttgtagaacctagcgatattgctgaagctctttattctatcggtatgaacttggcttatggtaaatcacccatcgaaaacactaaatataaatttgatgaaactggatttagagttcatttaaagtatgaggaattcataaaatagttcaagtaatgagattttaattaggattaaactaattaatgatgcgaagtgctgtgtgaaagctaaataattcaagatttttagcctttaaatagaattaatattatattaaatatggaattaggcagctgaaaatcataagattttagcgaatttaaatatagaaaaggtgtcacatctaatgcgattcataatcaaatttaatttccatgagactatcacacagccaaagtctagaaatatatatgtatacctatatatttcatataaatattttcattagtacaatttaggacatgcatagcttataaaatttaaaaaacaatatatatacgttgcaataataaacttacatttaaaatttcagcaagccaagtgcttaattaaaataataatgtagaaattaaattgcaacatatatattgatgtaatgaagtttatgattagcaaatcgaaataatatgtaagataacattattgtataaaaaatataaattttagaattagtaaaatatttttgttggagaaatatgcttatagaattagctgcaatagtacattttaatttaaatttaggaaattaaaattaaatttatattttaatagaagaatttaatgaataattatcatattctaatatataataaacaatctagataagaaaaaggggtgcagctaaattgacaaaaatatatgatgttgtattaaatgctccgtttggtagtcagcagggcagaattacttttgtaataaatggtgaatctttgacaggagtaattgatggaatgggatttaaaagcaaatttaataacggaagaattcatggaaacaattttgaattttctggggaaataaaaattctattggctaagttaaaatattctgctaaaggtattttaaatggtaatctattgtcagcatctgttgatacaaaatatggaacattctctgtaacaggaagtcttatatctcaatcttaacgtcaatttaaataagataaatataagaaataataaaaaaatttgaaatacaaaaagataaaaaataagtttagataatataaatatttgttagacagtaaatttattcaattagatttactgtctatattaattattaggataattagtagaagttgaatttatattacataaatagtacccggcaattatttgaaaagtgaaaagtatcattgctgtgattatttataagagtataataattgaacataagcagataataaaaagggttataattatgtaagtatgatacaaattaagagaaatactttcggttatatatcgtttttacttataaaataaaagaactaaaaaacaaaagaagaaaggagagatataatgcaaaatatgaaaataaaatcagaagcaggatggaaattagataatacttatgctgatctacctaaaatattttttagcaagcaaaatccaacaccagtaagagctcctaaattagttattcttaatcagcagcttacagaatcattaggattgaagacagaaatacttcatgatagtgatagtatagaaatatttgctggaaataaaatagaagaaggaagcttgcctattgctcaggcttatgcaggacatcaatttggttattttaatatgttgggtgatggtagagctatattacttggtgaacaaattacgccaagtggtgaaagatttgatattcagctaaagggatcaggcagaacaccatactctagaggtggcgatggaagagccgcacttggaccaatgttgcgtgaatatattattagtgaagcaatgcaaggccttgtaattccaacaactcggagtctagcagtagtaacaactggagaacctgtaattagagaaaacgtgctctcaggtgctattctaactcgggtagcttcaagccatattagagttgctacctttcagtatgctgcaaagtggggaactatagaggaactcaaagctctagctgattacactattaaacgtcatttttctgatggtgataacttagagaatccttatatttttttacttcaagaagttattaaacggcaagcttcattgatatcaaaatggcaattagtcggttttattcatggagttatgaatactgacaacatggctattagtggagaaactattgattatggaccttgtgcatttatggatacatatgatccggaaacagtatttagttctattgatagagaaggaagatattcatatggaaatcaaccacctatagctgaatggaatttagctagatttgctgaaaccttattaccattaatccataataatcatgaaaaatcagtagaaattgcacaaaatgaactttcaaagtttgcagatttatatcacgataattggattagaggaatgagatcaaaacttggaatattcaataaagaatctcaagatgaagaacttattgaaaatttgctaagtattatgtataaatataaggcagattatactaatacatttagtgcgttaacgttagctaaatattctgatatggagttatttaaaactaacgaatttaagcaatggcatgaattatggaatgaaagattaaataggcagcaggaatctaaagagtcttctaatatgttgatgaaaacttcaaatccttctgtaataccacgtaattatagagttgaagaagcactgtctgctgctgaaaaaggtgattatgctgttatggataaactattacatgtactatctaatccttatgcttattcggaaagtcaatctgaatatggaaaattgcctccaaaatcttgcggctcgtatcgaacttattgcggaacctaattttaaataataatattaataaatttttaataaaataaaaatacctaaaaaagggcgagacataatatagcccttttttaattttgtgaaaaatacataaatcattgggattatgtatttagaataataaaaaatattagaattattatgtaaaactaaaactaattttaataaaaaatcatataaaaaatttaaaaagtaataaaaaagacataaaatttatacgtttacacttaacaactaatgaaatttatggtataataaaaaacgtattctggaaattgaaaaggagagatttgatgtcaaaaagttatcaatggataaaagttgcaaaaaaatcaatcgttttttctgtagctttgagtatttatttaggtattggaactgctttttcagctaatttagctaaagcagctacgacacaaaataaagatataatctgctcaacaacagcgtacacagcggagtcaggaagtgtgacagcaagcggaaaaatagcaaagagaaatgcaagtgggataagtacagtagcggtggatccaagcgtaattccttttggaacatatttatatatagaaggttatggatatgcaatagctgcagatagtggaagtgctataaaaggcaattctattgatgtttattttgatagcgatagcgaatgtgataattggggtaggaaaactgttaaggttacggtatttggaaaatctgacaattaaagagaaatgaaaatgtttaactaatctaaatgagtgttaaaataattgataaacataattctaataattaaatccagaaagcaattagttagacaagcttatttagagatcagttatacttaagtttatgaagtgaatattcaattgttataatatctaaaagaagtgtttctaaaatatagggacactttttttatttgaaaaagaggaaaattgatgtagtgctattgacaaaatatcaataatatcttaattaatttaaaattatatcaataaaagtttttatttaaagataaaaacgaaaaataacgtgctatatattaactaattaataatataaaggaataagattgacaaactagggaatagttgttagtataaaagtattcctacaagaattgtatgaattaaaaaaattaaaaaggtgataaataaatgaatattgactggaatttcgtagtgactaatttgcctttgtatgagaaagctgcatggcttacattgaagttagctattgtaggaatacttttatcattggtaataggattactatgcggaataatattatactttaaagtaagagttttggataaaattgtacaagcttatattgagctttcgagaaatactccactacttgtacagatattttttctgtattttggtttgcctaaattaggatttaaaatgggagaagctacttgtgctataattggtttagcatttcttggcggtagctatatggctgaagcttttagaagcggagttgaggctgtaagtaaaacacaaattgaatctggcataagcattggtctttcaaagggccaacttattagatatgttataattccacaagctttttcagtaagtatgccttcaataagtgcaaattgcatatttttattgaaagaaacttctgtgcttggagctatatcaataatggatctcacaaatttaacaaaagatttaataggaatgtattatagaacttttgaatcattatcattgctagttttgatttatcttatcatgattctacctttatcatttctaatgtcttggatagaaaggaaggttcgatatgcagaattcggcaattagtgttatttttcaagaaaacaatattaagcgcttatttgaaggcctgtttgtaacagtagaaattgcttttatatctattattataggatctatactagggatacttataggtttgagtaggactacaaaatcgaaggcgatactttttattaacagagtttacctagaagcttttagaataataccaacgttggtttggctatttgtattctactttggagttactacagcattaaatataaaccttagtggagaagttgtttctgttattgtattcagcctttggggcgcagcagaaatgggagatatagtaagaggatctcttcaatcattaccaaaacatcagattgaatcagggaaggctttaggtttaaattattatcaaatatatagatatgtacttatgcctcaagctataagaagaatgatacctggaaccatcaatttagcaactagaatgattaaaactacttcgcttgtagttttaataggtgttatagatgttgttaagatggggcagcaaattattgaaagttcaagatttcaatttcctactgcttctttctggatttatggttttatattcttcttgtactttataatatgttatccactatcaaaaatatcgaaaagactagaatcaaagtggaataattaggaggaacatacatggataagaataataatcctgtcttgcttgaaatacaggatgttcacaaaaaatacgatgaaaaagaaatattaaaaggtattgacttgagtctccataaaggagaagtattagttatcttaggaccttcaggctgtggaaaaagtacttttttgagatgtctcaatggactagaaaaaattcaaggtggagatattaaattcaaagaacaaagttttacagacaaaaatgccgattggcaaaagattcacgagaaaatagggatggtttttcaaaactatgaattatttcctcatatgacggttattgaaaacatacttttaggtcctttaaaggttcagaaaagagagaaatctgaggcacttgctcaagcagaacaacttttaaataaggttggattacttgacaggaaagattcatatccacgtcaactttcagggggccaaaagcaaagaatagctatagttagagcgctatgcatgaatccggaaataatactttttgatgaagtaacagcatctcttgacccagaaatggtaagggaagtactagatgttatattaggcttagctaagcaaggcatgactatggtaattgtcacacatgaaatgggatttgcccaatcagtggcagataggataatctttatggatgagggcaaaatatgtgaagagtcggggccaaaagaattctttacaaatccaaagacagaacgtgctaagcactttctaaatatatttcaattttaattattaatagggggatgacaaaatatgaaaagcataaaaaaaatagtagcagctttacttttaagtactgtagtagttggaagttttgttggctgtggtaattcggcacaaactaataatggtgattctaataaagcatcatctagttctttagaagatataaagaaacgtggaactataaagattggtgtatttagtgataaagctccatttggatatgttgactcagaaggaaaaaaccaaggatttgatgtatatgttgcaaagagatttgctaaagatttacttggagatgagtcaaaagttgaatttgttttagttgatgcagcaagtagagtttcttatttagaatctaaaaaagttgatataattatggctaactttactgtcactgatgaaagaaaagaaaaagttgattttgcaaatccttatatgaaagtatcacttggcgtagtttcaccagatggcgctaaaattacatcagaagatcaacttaaaggcaagaaggttattgtagctaagggaacaactgctgaaacttatatgactaaaaatcatccagatgttgaacttgtaaaatatgaacaatattcagaaatattccaagcattaaaagataaacgtggtgatgctattttaagtgataacacagaagttatcgcatgggctaaagataatcctggattctctgttggtataccatcacttggaagtacagataccattgctccagctgttactaaaggtaatacagaacttagagattggattaatactgaacttgaaagcttaggcaaagagaactttgttcacaaagcttatgatgaaacattaaaatcagtatatggtgctgaatttgaagatagccttgtagttgaaggtggaaaaatacaataagattttttaaaggatgaggatacaatgtaatcttcatcctttatttttatgcactcgaattatacactgcaatcaatatttaggaagtattatgctcagctagtattttaaatcacttaattaaagttttataagaaagttatgttttataaaaaaaataaaaaagaagatatattcgcctgcgattttattctcgttttgagaattggaatgtatgagtacgaagtttgtattcatgggcattaaatcgattaatagcgatattttttttgtagtcaaatgtgtaagattatgctaatatttaaatatgaatacctatttgggaaagttttttcttttaagtctagttaataaaaatccaaatagattttagtatatgtttgctttctttaaaagttgtgttgtaagcaaactatatttaattatttcagttggaggtgtatatgagagttgttagtgtttccagcctaaagggagatgaaatactaggaaaacagatttttgatgaatctggtagaattttacttagcgttggagtgaggctgaaaccttattatatcgaaaaaattaaggaacttggtatttattcggtatatattgatgatgatatatcaaaaaatctcgacattgaagaaagtatttctgataagacacggcaaatgagtaaacatgcagtaaaaaaaatgatagatggatattgtcgtgaaggaaaaactgataataacagcgttatgaattctgtaaactcagttattgaggatatactatccaataaagatgttttaataaatgttgcagaaataagtgctagtgataataatatatattctcattctgtaaatgtatgcgtattagctacaataataggaactcatatgggatacagcatgtctaaattaaaagatatagctgctggtgctcttttgcatgatattggcaagataagaattatgaacgataaaaaaatttcgtctgaatttaaagataaaaatgaattcaacagatatatggaattaatgcatcctaagattgggtatgattttctaggggatcagcatgtttggaatgcatatgttaaagtggctgttttaatgcatcatgaaagaaatgatggaagtggatatcctttgcagctaaaaggagacgaaataaatcaattggcaaagattgtatcgatttgtgatacgtttgacaatatgatatcaggtagagaagaaaatgaacggaaaactgtgtatgaagcaattgaatatctaataggtatgagtaatatttattttgatgaagaaatagtgagaaaatttactatgaatatagcagcttttcctacaggaagtggtgttattctaaattcaaatgaaaagggattagttgtaaaacaaaataactcaatgccaatgcgccctgtagtaaaggtgttgtatgatgaaacaggaagtttactacctgaaccttatgaagtcgatttactgaaagaattaacactttttattacaaagactagtgaaatttaattttaggaggataatatgaagaatcaaaacaaggatgaaataaatatttattctaatgatttcctaaaattaatgaatagtattcatgtgagatttttagaggtgaattctataaattataatgagttattaagaaaatcattagaggaaattggagaattttttgatttagatagaatatatatatatcatttttctaaagacccaacttttatgaaaatagaatgtcaatggaataaaaagttaataaaaccaaaaagggaaattatagaggatgaagtagtttacgcttttccttggttaattcgtcaaattaaaagtaaggattttattgctttaaataatataactgaatttccggttgatgcaacatttgaattagaagcttttaatatagagggaataaaatcgtctcttataattccattaaaagataaaaacaaattaataggttttataggatttgaaaccttatcgaaatcgataatatggcaatcggaacaggtaaaaatattaaataatatttcaaagtttttagaattcataaaagctaggattacaaaattaaaagaatacgaatcacttcttaatggccagactattttacttgataatgctgcctcacagatttgggcactaagcaatgttacttcatatgctactgttaatgaggctcatgcagaattttttggaaagaaaaaaagtgatttagaatataaagacctatatgacatatttgatattaatactgcaaataagttatctgaaaataattgggaattatttaggaatgatgaaccagcagagaaagagcttaaaattaagaattggaaaggcgaggacaggcttcttcaagttaaaagtaaacctattaaagatgactatggtaacattaaatatcttgtttgcacagcacaggatattacggaacaaagaattgcagaagctgaattatacaaggcaaaagtagaggctgaatcagcaaatatagcaaagagtcagtttcttgcaaatatgtcacatgaaattagaactccaatgaatggaatatttggatttttagaattattggaatcgtcaaatctctccttggaacaaaaagaatttgtacgcgaagcaaaatctgcttcagatattttattaaatattattaatgatatattggatttttcaaagattgaggctaaaaaattagtactagaaaacataagctttaatttaagaactattatagaagatgctgtttcactttttgttcccaaaactttggaaaaaggaattcagctttatacaataattgatccaactattccagatgaggttataggtgatccgtcaagacttaagcaaatattaaataatcttttgagtaatggtgttaaatttaccgatgctggtgaaattgcaattaaggttgattattttgaggaagaaaatgatatcgcacttcttacatttgaagtgagggatactggaattggaattagtggaaaagatatacaaaaactttttaaatcttttaaccaagcagatgcatctacaacaagaaaatatggaggaactggacttggactttctatatgccgagaattggttaatatgatggatggtgaaataactgttgatagtgtattggataaaggatctacttttagattttgtgtaagattaaaaatatctaaaagggcttctgaacatatctccattttcgaaaatgttaatgatgtaaatattttgattgttgacaatgatgaaaatagtagaaagattacaagttcttacctcagaggaactgggttacatataattgaggttgatggtgctggtgaagcaatttcaacaattatttctaataatgatacaaaaaataaaataagcattgtaattattgattgcgagataacaggaatgaattgctatgaacttgcacgaacgttaaaaaatatacccatagcgaaaaatataaagttaatactgttaatgtcgaggtataaaggagactttaaggcagcaatggaatatggattttcgtcttatttgaccaagccactaaaaagagatgatttacttaactgtattgctgtaaatttaggcttgaaaaaagaagatgaagaatatcatgaagactcaaataaaaatgtagttaaaaacatttataacttatcagaaattagaattttattggcggaagataatgaagttaacagaaaaatttttataagcatgcttaaatctcgtggtattacttgtgatgtagcattagatggtaaagaagcattaagaaaagtatcggaagaagattatgatattgtattcatggattgtcaaatgccaataatggatggatatgaagctactgctgaaataagaaagattgaagaaaatagaaaacatacaaaaattgttgcagtaactgctaatgcaatggaaggtgattcggaaaaatgcattaaatctggaatggatagttatattactaaacctattaattttgatattgtatttaaaataattgaggaaagcattataaataaaaagcataatagtatagattattctagaataatagataactatgttaatcagttttctagagatacaggtcttgatatagaagatgcgttagaaatatttgaagactacataaggtgtttacctgatttgttagatggaattaatgatgccattaatactaacgacttaaagaagctagcaaagttttctcatgaattaaaaggttcatctggaacactagggataaattctgttcacgaattagctacaatgcttgacaaaaaagctttagaagaaaatttagatgaatgtaataagatttttggacaaataaaagatttgttttataaaatataatttaataatagcagtcaaattctgaaaattacagatgaaggagtttttaatatgaagaagattttgatagtagatgactcatcgtatatgcgaatgtttatacgaaaaattattcaaaaaaggggaacttatatgatcatagaagcatcaggtaaagatgatgcaatagaagcatataaaattgaaagtcctgatattataattttagatttaaatatgtctgaagttagaaaggatggcattgatgttttgagtcaaataatgagtattgatcctgaagcagtagtgattattatatcggcagtagggtatgatgatgttaaggatgaatgtttagccctaggagctaagagttatataaaaaagccatttgatactcaaactttaataaagacactagaagaatataaatagaattttaatatagaaatttaaagattgttatttatactgaaaaatatatatttagtaaattagttgagattaaagaatgcagttattaatggaaaatgtattctttaattttttattaataaggaataaattcgcgtgtttataaacaacctaacattataaatttaaataattttgaaaagttaagtgggagtcttattttattatgataaatacaatatgtattgcaataataaatttgaatttaaagacatggtaagctaggtattaaactaatataatattagcatatagaaaatcaattgcaatatactattataaatagctataaattaatttattcaaagtgaatatattatatgaaatgcaataaataaatgttattttttaaattaaagtaagaatttatttgatattatttaaggaggattttatgttagacattataatttacatagtaataggggccgcagcaggaattttaagcggtctgtttggaattggtggtggaataattataattcctgcattgatgtatttaaaaggattttcacagcttacagctcagggaacgtctctcgttgcaatgcttccaccagttggcttacttgcattcatggaatattataagaaaggcaatacaaatataactgcgggtataattatttgtgttactatgctaattagtgcaaaatttggaggccagcttgctaatattcttccagcaagtataatgaaaaaagcttttggaatatttattattttggttggaataaaaacttttctgggtaagtaatgaaaaacagttaatcagtaaaaaatgttagtctatattattaaaataaccattaatttattataagttagtggttatttttttatatgtttataatttaattgctgtatcttcacttgaaaatagtctaaaaacatagtacttaaattaagtaaaatattaaagattcattaattatatctgaatatttggtcatttttgatacatgagatgataaattaaagaaaataaaaaagccccaattgggggtgctttaattaaagaaaatgagtgaaaatacaatggagctgataaatatctaaatcaatgtgctttggattataccatcatatagttcactcaaagctatagatcgaatcgtatttattaagtgtatgcctttcaacaatttaaataccaactaactaaagagctatttttctagcatcttgattatctattgcagaaataagagttattttttcgcttgaaatcaagatattagtattttcaacgctaggtttttttactgttactacaagatttcttgggccacctactgcctctatagctctatttataagtttaatagtataagaaaatacttcttttatatcttcatttgatgaaaacacaactgcatgtccagctttaagcattagaatgctgtttcttattattgtttcgataggattagatgcttcaacaacaactccatttacagtataggaattatcgctgttaattatagataacctagattcaagatatttatcatttaaacatttatctaatgcattagtattattgtaaagaatattactgtaggagctagcaccactctctttacaagtcattaaactaagttcctctaagtgcaattctaattctttaattactgaatctactatttcattctttttttgctcactatattgcttatattcttcacaagcaacatgagctaatttaatagcatcttccattgtgtcaaaaactccacaatctccttgtctatcaattataattgcatattgaattggtttttttactatcatagtatttatccccctcatatttatagattttaattttttactatgatttctactaatatagaagcagaagaagttaaataattaacgttaattatttaacaataagatttaaaaaaatatagatatttatattactatcttattaagtattataacaatatgttactaattattcaagtagttgttgtgaattttctgaattttattttttattgttaaaaaactagctaattataaattcaatttgaagaatatgtataaattatcataataaaaaataataatttaacaatcttaaaagtatatggatagataatatagtttgttttttatagatatttatttatataacataagtaatcaatatttctactaagtaataattgacaaaaacatcaaacaatatacaattatcttattaggatatagggggaattataaatgaaaaaaatagtcagtagattaatatttggtttcgtattattttcaataattggatatagcggcattccagagaaggtaaaaaatgaatatattaatagtaataagtatgcaggaatacatataaaagaaataaaagagagatcagttctaaataattcaggagaagaaataggaaaaagaggagaagttacatataatcctgataaaataacagatgaagctttaataaatttttataatgataagattaagaacacggggtataactattatactttaataaatgaaaaagataaaactcagggtattgtttcaattgcatgtgtaaatgtattaacatattcagaaatagatgacaatggatatatagtaaaagcaagtaaaaattttgaagtaaaataggattgtataaattataacttttgacttcatatataagttaattaaaagaaggcactaaaatgatctctaagactattttaatgccttcttttaattaattttttaaagtaaagttttaggtttcagcttgacatttattcttagcgttatcgtaatctcttaataaatgattctttcttttaaatatgaagtagtatggaacttcataagctagcataaatatccatcctatgaggctggcataggccatacttatcatacctacatgagaaactaatataaaaacaaatattactctaaaggatatttggataagtgtagagattaatgtaattttcatgtttcccatgcctctgaaaaaaccttgaataccatttgtaaatgcaggaaataaataaaaaaatgccataagtcctaagtaactcacacctaagtcaaccatgttattatcattagaagagacaaataatttcattataggtgtcttaaaaattaatacaaccaagcagattattatccaatagcaaaactctatgaataagccaattctaaatccagccttaatacgatctttatcatttgcaccacgattttgagcaacaaaagtcatcattccatgagatatactttgttgtggagtgaaagcaaaatcatcaactctgtttacagcattaaaggctgctattgtagctacccctaatggattgatagcaccttgaattaacaatttgccgattggctgacaagattgctgcaaagctgttattgatccatgctggagagtttgttttaaaagatttctatctaattttatatcttttttagatagtcttaacaatggtacttttttatatatgtaaattatacaaaatagagcagaacaagcttcagcgatagttgtagctagtccagctccaactactcccatattaaagccgcctataaaaataaagtcaaggcatccatttaaaatagatgctatagctaaaaatcttattggagtttttgaatccccaacacttctcattgctgcagatactgcattatataaatatgtaaaaggcattgcggcaaatattattcttagatagagtgctgcgggctcgagaatttcatttgggactccaaggaggattaatatattcttagagaggattaagcccaatattacaattgctagtgaaaagaaacatccaaatattaaagttgtggagatttctttctttaattcttcatatttcccagctccaaaaaattcactcataagaactgatgctccgatacatatacctgttattcctaaaattacaatattcattacaggattagcagtaccaacagctgccaaggcatctgtaccagaaaatcttcctactattatcgaatctacggcgttataagtaagttggagcagatttccgagtattaatggaatagaaaagcttataagatgcttaggtatattccctttagtcatatctttagtcataattttcacttccttaatatttcttcattaggttattatactaaaggggagactacgtcttcaacaaactaattagagaaaatgtttcattttgaaatcattttagctttctccataatgtactatgactaattttcaatcttttctcaactttgacctgattcattccttcttgatccattacatactttataatacgagtttctatttcttttaagcttccatttaaatcaataggaactagagaagcatttttatgattttcaatttcagcctttaatgcagtttttacttcgtcaacattaatataagagccattacatttaagtgctaattggtttactactctcataaattgtcgtatattttcaggccaagcgtattcagatagcaattttataccaccttcttttatacctaccacttggcttgcacatcttaaatctagttttgaaagatacatacttaccatattgctgatttcattgctgtaattttttaaaggatttaattcaattctaacttcatcaattattgaacggagttgcctaagtaattttccgttactaacacagagttcaacaggcaattcgctagatgcaattattttaatagtattgtttcttgataatttttttaaaatattagctatctttttttgtccttctgtatataatgtatcaatatcctccagaaataatgtaccgccttcgtttttaaaattatcaattatgattttatatagaaagtcgtagttgtaatattcaggaatagattgacaacttacacatattaagctttttcttttttgaggaccatagtaagtgcataaatatcctacatcattcttacacattccgtcttcaccagtaataattgttggaagtggtgtgttacttaaatataatatttgagaaagaattgtttgaggaaatactgtatgtacaaagcttggtgatatttcatctggatttaatatttttataaaatcatcaatattacttttttctcttttttcataatatgtatagtcaattgcttcagatcttaagtctttattattagaaagagcgttgcataagcgtactgcttcatcaatagcgctttttacagattcaattccacttgtaataagtatgctattaattccaaactcttgagctgtttcatataccatattatcgccgataatgagttcgtagttttcttgttttagttctttaattaagtctggaatatctttatgtttaaaataacactttgattcgattgagtaacctaaaaggtcgcttaactgtttaaatgattcaaatatatttggataagataaaaatattttttttcctttatatccttcagataattttaaaattctaattatatcaaaggcattaatatgaatttcaacaataggagtttgagtgatttttctgcaaatttctgcagtaccacctcttgttatgatcacatcatattttttgtttacatttacttgtttcagaatttttggtccttgttcataattcccttgatatacatcaatttggaaatccttatattcagatgaaactgacgctgcaatttcttttaagccaaagtagggcgctaaaaaaagtatttttgctttcatgattgtatttactccattaattaatttattatactattatatcaaatatataaattaattaattacatatattatctatatttaaaagtctggagatccagatacttaattgcaatatatattgagcaaatatgtattcaatttccgctgatataaatataagtcaggctctcattgtaggaccctataatatattgataccccaaaaggcagttgtctataaaataaaagtttatgtttataattgaaagaaaccagtgctataaaagcactggtttctttcaattacttaatagtttgttttaatataagaatataaaatattatattatcttactggacaaactccatttgcgcactctttatcaattatttcatgttcgtcatcatcatcgagttcagctaataattcataatctataggtttaatattttttatacgctcctcataatcttcttttgttgtagattcataaggtaaaagtgggtaagtttcgtctgttagaggaaggaaagttataccaaccacatagtcaaaattctcatagagccaattggcaacatcatcccactcattttcccttacatgtacggtaattgaagtattgtgatcagtccaatttatcattgataatttataaagttcaagttgttctatagctccaacatcatattttgtttttccataaggagctttgattggaaattctataacttttgttgtgcaattttcatcactttgcccattttcattataaattggatagcattttagcttttctatcattttatatagagggtcagatgtagagaccctaactcttctaatataataattagaatgtgaataatgtattcctgaacttacacatggaagtgtggatagagatccttcaggcttaattgttgtcataagctcaggaatggaaattccaagttctgagcagtatttaataccttcgcctctaactacatctcttaaacgctttagcaataaacctaaatttttataagtcatgtttgttctatttaccatatccatcattccagttaatgatattccaacgattctatcattttgcatgattttattccaatctggaagttctacgtctactagagtcattctaatagccactctagtagatagctttattattttttctaatttatcaatatctagattattatcttcatttacgaatgaggctaaattgttagttgataggttgcagcattgatgtgaattaagcaaaatttctccacatgggttacaacctttaaatgtactttttcttctcatggcttcacttccattaataaaaccaggttcaccatttatttttatggattctaaaattttctttattttattaagcgatggtttttctttatataaaacagaattattactcattttcctatgagatacttctgaattttcaatccaatttccattgattattgtatataatttactttttgcatttataacatcctcatcattttcatcgcaaattatcatcattgcactacgcctaactccaccagaaactacattctcacttattatggtagctatatcaagcacatctatggaccttaagcttccattaacaagattactgcaaaccttatttattttttcaaacattctttttaatgatttatgaccagatgctctgccaccaaacctttttaatctttcaccctcaggccttacatagctgtaatcaaatgtaattttcttaatattaatatattcaggacttgtaattaaattaaagtaagtttctagagcattacaccagccttctttgctgtcaccaattttaatcttagcgattgatggatttccatcgtctaaaataagttttgtgttttccatatattcttttggcatgaacttatgaatatcttcattgtattcgctgtctagatatattctccttatattaggcatttttaatattagagatttatctattctaacaccgacacctgaaccaatcatgagaagatagaatatgtctacaaaatcatggaatttttcaatcattgtaaatgcacagttataatttgaaagtggatattcttttactatatcagttccacccatataaagagttctacctgatgtaaaggtccttaaattgaataaattatcaaataacagttcagcttcttttacttcatcttgtagatttatatttaatccatgtttctttttaaattctataccaagttcaatgttatattctgttgttctaagaactgtttcaaaccaagtttctcttctttttttattgtttaaatatctagaataagttcgtaaatagacaaattcgccaatattgcttaaaggcgtatgcttaatttctctgtatttgcttaaaaatgattctgataatagttcactcatatatattcctccagttttacttaataagctaataatttctttctaatccttatattcttttgaattataatatcttcaagttttataataacattattttaaatcattttatgataaaatacaatatgttgtatttataaaaaagaacttatacaatatatagagttgtcctattcgccataatgattgactttaacaagtaatatgaaaatttaatcaagtatatttaagaaagacttataaaataaaaatgtgattttataaagagattatatgagtaattgcataaacgtgataacaatcacggttttatataataaatcatgatactgtaatttagtaatataaaattttaagcggctttagctatagatctaaatataagctatatgcagttacttacaggtataactgtaggtcttttattgcgctcaaaagtttcataatatgaattattacttttagctaagattagcacatagaccgcttgtacagaaaggatagataaaatacaatgactaaaagtgagcttgaatcattaaaattagaaggttttatgcaacaacaagataaagaatatttttcacttagaatattgacagatgcaggaaacttaagttctaatgaaatgatttgtctagcagaaatatctgaattatatggaaatggatacatgggatttacaacacgacaatgtgttgaaataccttggattagagaagatttaattccagaggttaagaagaggatattaaacgcaggaattaagacgggaggtactggtacaagggttgtagctgtagctgcttgcaaaggagcactttgtaagtttggattattagattcacaagaaatagctaaaaatcttgatagaaagtttttaggaatagatcttccgggtaaatttaaaattggagtatcggcatgccctaataattgtgtaaaagctccaatcagtgatttaggttttttggctcaaaatgaacccaaggttgagatagatatgtgcaaagggtgtaagatttgcgaacgtacttgtaaagttgatgcaatatcaatggtacataaaaaagcagtaatagattataataaatgcatttcttgcggtcaatgtataaaagcatgtccatttaaagctatgaagctagaaaaggaaggagttgcagtatatttaggtggtaagtttggaagaaatttaagaataggaaatcgtcttaaaaaactttaccagcttgatgaattggaagctgttacagaaatggttattgagtattataaaaataatgctaacaaaggtgaaagattaggagcgacaataaacagattaggttttaatcatataaagaatgaattagatatatagatattgctatagttaactctcgtttagtactatatttaagaactatgttattgaaacatagttaaatgaattgacaatgatgaataaataaaataaaatgatattaaatgataataaagtacattgaatgataatgaattactatgggggagatgtaattatgaaaaaagcggttttttttgacatagatgggactttaatggactgtttgaatggaataacagatattagacctagagtaaaaaaaacaattcgctcactccaagcaaatggagattatgtatttattgcaacaggcagaccatatgcctttttgaatgagtctttgtataactttggatttgatggatttgttcttaccaatggagcatacgtaaaagttaaggaaaaatgtatatataaagaatctcttaaaagggaatctataaaagaattagtgtataattttgagcagcgtaatattcaatatatcttgcaaggagaaacatattcatatattaaagatgaatataaaaaattacattctttctatgattcttttagtatatctaaaaagtatttccaatccgaatatgatctagaaaaagtagagacatacaaaattgagatgctatatgatgataaaactggaatggattattgcttgaatttagcgaatgaggattatgattatattcataatatagaggaaaaatcttttgaactatattcaaaatcaaatacaaaggcaactggaatattaaaagtattggactttttagatattccaatagaaaatagctatgcttttggagatggtaagaatgatatagaaatgttatctacagtaggatgtggaattgctatggggaatgccgaggattacgttaaagaacacgccaaggaagtaactgatacagtacaaaatgatggagtagctttaggaatagagcgatttatctactaaaatagacctgcattttatttattaaaatgcaggtctattttagtagattttattattatttatactaatctaaaaaatcatatgatctatttaatgcatctaaagaatactaaaattaaaatttttcaaatattatttgctgcctatattaccaagaaatatgcgagaatacaacatatataaccttttcatatgcaattatgaaaattatatctatatgtaacaaaaattacttttgtgtttgatacattcttatcctataatagggcaataccatatcggtggggaaagtaacctagaatattcttaggtcacaaataaaacacaaggagtggtaatttgattaaattaaaaataaatgttataaaaacttgtatatttctaggagtatgtttgttaggatttgaaacaaactttttagatccgcaaactaaaaatattcaaataaatagaattgttacaggtagctataaagaagatcttgatttccaaaaagaaagtaccgatactgataaatatgcagaatcagcaaagaaatcagatgaagtttcatctgattcagtaaatacatcatcggtaaaaaatcaaaagcaggtaggtaaacctattaaagcagaattaactgcatatagcgatgatcctagatgttcagggaaatgggagtcacagacagcaatgcagacaagaacaagaataggtgttattgcggccccatctaatataccgcttggaagcaagatgtatattccagagttgcaaagttataaatctgatggcatgtttgatgttgaagatagaggtggagcaattaaagtaaagaaagatggcacttatgtaatagatgtttgggtcccgtcatatgaagaagccaaacaatttggtagaaaaactactactatatatctattagaataattataaatttagaattgctttattatcgttgattttatttacacaaatatcctaagggaagttacatctttcaatttaaatatttataaaattatatgtaatattgttaatattcaattggatgaaacccttaggaactttcataaaaaatataataatgatttcataattatgacagtaagtttatcaaagataaatttagtgcctttttcttgctttaaaaaatgaattgaacattaatgaattaaatgaccggaatgaccaatgttgattagaaatttgcttcaaaaaatataaagtcattttttgaaggtcatataacttcattactaactcatatcaaaaaaataatctaaaaaattgacattacgagataaaaatatacaatagtataatgggtgggtgaaagttaaaatgaaaagaactaaaaaattgttatgtttattattggttgtatttttatctttgtttttaatctcatgtgaaaaaaatgacaattcaaatagaaattcaggtgcagatgaaaagttaaaggtgcattacattgatgttggacagggtgactctgaattaatacaggttaatgggaaaagtattttaattgatgcaggtaaaagcgataaaaaatctttagattatattaaatcacttggtattaccagattagactatgtaatagcaacgcaccctcatgaagatcatataggcagtatggatgatgttattattaattatgatattggaagtttttatgccccaaaagttactacaacaactaagacatatgaaaatatgattgatgctctaaaatataaaggtctaaaaattaatgttcctaaaacaggagaaaagattaatatagggaattcagtattaacatttctagcaccaaatagtagtaagtatgatgatttaaataattattctattgttattaagctagagttcggtggaacaagttttatatttatgggagacactgaagatatttctgaaaatgagatattagcaaaacaacttgatattcaagctgatgttttaaaaattggacaccacggaagtcattcatctacaactcaggcttttattgataaagttaatcctaaatatgcagtaataagttgtgaaaaaggcaatgactatggacatccccataaagaaactatagataaacttaataaaaaaaatattaaggtattcagaacagatattcaaggaactataatagcaacttctaatggtgagagtataaagtttaatgtagattcagtggataaaaaagctaatgtatctggaaatgagctaaagaaggcatctagtaagtaggcgttaacacaattcaatataacttaataataaattaaatagatagtaatggatttgtatggaaattaggatacattactttctattttttatttgttaagttataaagtaagtaataattttttcaaaaatttcatcatatggttaatgaactagatgaatatatttttattttaaatcatttaattaaaggcaatatgccgcctataggtgatattaacttcaattattgcagacttagagtgaatttaatatgtattaatgtaattaagatataggtggagcattcgcctatatttttttgctttatattaaattttatatatcataaagatatgttaatgaaaactaatagaagtatatgtaatattgaatagcaatagtatactaataataatatcaagataacactaaatttcttaaattatttaatattataaataaatgcaatattgttgtatttattttaataatttaaaacgaaaattctgctaaattatgtagaaaaataatgaataagatctatttaaatggtataattgaatatatgtgtataaaaatctaatatcagattattgaggtgaattatgaaaacctataatgttaaatatagggactttaaaactttacaattatacgtaaatagcaatgacatagtgaaatataataatatattagtacaggtgttttccggaatatgcaataaagaatttataaatgaaataataggaaatttaaaattattaattcctcaatgtaaaatagttggggctacgtcgtcaggtgaaatcctaaatggagatatatttgaacgggagtgcataatctccataagtgtttttgataaaacaataattaaatccatcttagttaaggataacatacctgattttagtaaaggtgtgaaaatagctagtcagctaattgggcctgatacaaaggcaataatatcttttggtgatttaagcattacgggtgatgatcttttaaaaggaataaattctgtaaatgatcaagttctagtagcgggtggaattgctggaaagagcgatccagcgtatgaaacatacgtttttacagaagaaggagtagcaaaaaacgcagtagctgcagttgctttaaaaggtgaatttttaaatgtaaataacggaagtagttttaattgtatacctatagggaaagaacacgaaataacattggtagaagataacatagtaaaaaagataggaactatatcagtaaaagaattttataacaagtatttgggtactaaaagtaatgagcaaattatacgtatgggaaataagttcccattaatggtaaaaagaaataatagatattttactgttcatgtattaaaattcataaatgcagaagaagcacttatatctacaaagctagatattggtgaaaaaataaggattggttttggtgacttaagagaaattttgcaaagtgcaaaggaaatgtatggtgagattacaaagtgtccatgtgaaagcttattgatatattcatgtgattcaagaaaaaatatatttaagaaagtaaatgctaaggaaataataccatttaaagatttatccgtaggtggcttttatacttttggtgaatttaacaatgtcaataataaaaatatgttttacactgaaacaatgactgtattagcactttcagaagatatcgatgcaagaattaaaattatatcagaaattgacgatgaatattcttattttaatgaggaggattcagcattatataatcttataaagaatactggggaagaattaaatcaattaaatataaaattagaggaaaaaataaaagaaaaaacagatgagttagaaaaacaatattatacagacaagttgacaggtttagaaaatagaaataaactaattaatgatttgtgtatagaaaaatacaataagctcacaattgttgatataaggtcttttaatgatattaatgatttttatggaaatacaataggcgataaggtattgaaagatatttctaagttaattagctggtattgtaaggagaataaattaaattcatacagagtaaattcagatatatttgctatagcaagtagtggtatagcaaaagaagatttcattgcaaaaatacaatttttacaaaatgaaataaacaatcaatgtttcgtttacgaagaaggtaaaatttacttgacaattgtaatgggagttgcattagaagaagaatcactatttgagaaagcagaaatggctttaaattatgcaaaaaaaaataaagaattatttcaaatatataggaaagatcttaatatatatgagggaatcaaggagaatataatatggactaaaaaaattaaagatgctatagctgaaaatagaatagttccattttttcaaccaatagttaataataatttaaaaacaattgagaaatgtgaagctttaattcgtatgattgatgaaaatggaaaagttatatctccatattttttcttggatatagccaaaagagctggactatataaagaattaactataataatgttagaaaaaacttttgaagttttaaataaaactaattatgaaatatctataaatcttcttcttcaggatataatgaacagtgaaattagagcactaattataaagaaattaaagaatgtacgaaaccctgaaaagattgtatttgaaatagttgaatcggaaggtattgaaaattttaatgaagttactgaatttataaaagaaataaaaaaatatgggtcgaaaattgcaattgatgattttggaactggttattcaaattttaactatcttatgaaactaaatgtagattatataaagattgatggatcaattattaaaaatgtgcataaagataagtcagcagaaattgttacaaagactatagtattatttgcaaaagagttggggatagaaactattgcagaatttgtatctgaagaagaaatatataataaaataaaagatttgaatgtagattattctcagggatattatttttcagaaccaaaagaaaatatagggtgatttttagtcaccctatatttacaaatcattgatttaataataaataatactttttatagtagggaaataatgtttaatgaatttctttgattgttaaacattattttccttttttaatttagaaaaataatatattaagcatgtaatgaaggcacatgtaatctttactatgagatcggttgcagtatcttcaagacttccatttgtcatgtcagttttaaaaaaataatctgctaagaattcgtatatttcccatatagtacctattgaaattgtaaaacaaaaggcaaatactaagctgaatttagaaaattttttctgagttgtatttttggttttttctataattccctgcaaaagatgcattccaattataacgccatatacaccaaatgtaccatgaagaaataaatcccaccaccagaacatactatagaactttaaagtttctcctagatataaagtagcaaatataaatattattgatgctgataaaaaactagatggaagggttattttattagaattagcaactttaagaacgataaaaggaataaatatgcttatagcatcccagagtaaaaaaagtagataactccacggatttgatgaggcggtcttaatagctgtaataataattaatatttcaaataatattgctaatattacgctaattttactgcttttgttaatcattaaaatcaacccctttctaatgtatatacttctaaatatttatagggattataaatctaatgatatcttttccttttttatataaaaatatgtacgtttaagaatgagcttgtcctagagtaaagtatttttatgttaatttgctctaggatgatgcctttctacaattaattcttatcaattataggaagatttattttttttatataacaaatcattctgattgaaaaaataacgattaatgatatatgctgagataagtgagttcctaaaagtggatatagaaaccacagtaaaagtgaaccaagaatacatgcaatgcagtaaacatcagttttaaaaatttcaggttttctattggtaattatatctctaagtacgcctccaccaaccccagtaatgcttgtagcaaatagaaagatcattaaattatagccactttcaagagctttaattccagaagagacagaaaaagctgaaagccctattgcatctattatcacaaacatattattatattttagttttccacgaagtataacaggaattgttgcacctaaaataataaaaggaatagttgtatagttttcaaaaaataatggaattccaacattcgttacaatatcacgaagaactccacctcccatagctgtgacggtagcgagaatatatataccgaataagtcgaatttttcctcgattgcaacatgagccccagatgctgcaaatgcaaatatgcctagatactccaatatattaatatcattcataaatcaaacacctctttcaattaaattttatgcataaaaatagacgaattgcataaacaattcgcctctgttattttacctgaaagattctcttttaatagttaactaaaaagattgcttcttgggtgtcataagactttccagagtttcgtcagaattcggtccttttgcctgagagtttgttgcgatttcaccttcggctctacattgtttgtagcatctcccaaattcatcacacgattactataattaataaaaatattataatttagttttaataccatgtcaaactaattattctaatattctattttttatttaatgcttatatgattgaatttagcataaaaatataaaatagaatgtaaaaaatagaagactgttttatttaatgaatgttttaatataattggaatattcattaaatatatacagccttctacttagaatctttaaagcaactattctaaaagaattaagttatatgcacatttaaattcacttacttaactaagcttaagtcatctgcataactaatttatttaattcatcttcgtgtaaagtctctttttctaataattctatagcaatcttatcaagagaagctctatttttaattaaaagtttcagtgtttcattgtatagatcactaacaatatttttacattcttcaataacaggatttccataactactatataagggacctacacttgatagatttatgagccctaaggtttcacccataccatactcagtaaccatttttaatgcaatatcagtagtttgagatatatctccatgcgctccagtagaaattttatctttaccaaaaattatttcttctgcagctctaccacctagtgaaacttttattttatttcttaaataatctactctgtggtagctggtatcctcaggaatagataatgtataacctccagcaccttttgttgtcggtataattgttattttagaaactttatcttgtggaagtaatagcatattaactaatccatgtcctgcttcatgatacgcagtaagaagtttatcttcttctttaagataacttctttcttttttctcatggccagctaaagttatagaataggcgttttctatatggtcagaagttatataattactgttatctttagctgctaatatagcactttcattaactaaactttctagctttgcaccagaaaaatatactgtttttttagctatatctttaatatcaatattttcatgtggtttgttctttaaatgaagagataagattttttctcttgcattaacatctggcaatgaaacttctatatgtctatcaaaccttcctggtctaagaagagctttgtccaacatatcaagtctatttgtagctgcaattactacaattccttcttcttgtccaaatccagacatttcagttaaaagcgcatttaatgtttgatctttttcatcgttactagatccattttttccattacctcttgctttacctatagcatcgatttcgtcaatgaatattacagcttttccttgagcttttgctttcttgaataagtttcttactcttgcagcaccaactccaacatatacttggacaaaatcagaaccactaagtgcataaaacggaactccagcttcacctgcaactgcttttgcaagcaatgtcttacctgtacctggatcaccatagagaataacaccctttggcattctagcaccatacttttgatacttttctgggttcttaagaaaatctacaacatccattaaactttctttagcttcttcatttccggctacagcatcaaagtttaaggctgctttcttatctttgctaaaatcttgcatttccatcgatgttacagaagacacaccaccctttgatttatatacaagcatcgcaactattgcaaaaagtgataaccctaaaattccagaaggaatagtttttgaaatagggggagtggtttcgtccttaacttcgattccatttaataatagcttttcttttaaagtatcagtatgtggattatctgtagagtatttatcaccactattgagtattacagtcattttaggagaagtatcaactattacagttgatattttattagaattaagatcttcagtaaaataagaataacctttattaactacttttgaatttattgatgttactatcattactataagagacaggatagctgttattataggaataataatatagtatttttttatcttattcattaagtacctccaatttcttaaaagatgacttaaggcatacatatctatcacttattttgtatgcctaatattgattatacagatttaaaattagaagtctaatttctttcattgattttaccaatgtaatttttggagaaatactcaaacagattttttactaaatgcaaaaaatttcattaatataaatgtgattggaacacctattattgcggctaataaataagcaataagcttatttaaacccataaaattaaaaactattactacaactatattctgaataataaaatttggaatatacgatattgcaaattttataaatttattcaactgcagtttttccttaaaagttataagactgttcaataaataggatataatcaaaccagaaatatagccaactataaatgctatattctcatttaaaaagcttgagtatatataagaaaaaacagttccattaaatgtattgataagtcctattattaaaaaagtaacgaattcttttgtatagaaagtatttttaaatttttgaactatattatccataagtttcctcctgtatattttctcatctatgcttgttaatttattaaagatgagaaatcatagtttttatttaatttcattatgtattttttgaatatattttagtattattcaagagaataagagttcaattttactataaatcatattgatgaaaccaccaacttatatttaacattagtctaatggaacaatccccttaaaaataaactagcatctataaacttctattaataattataaagagcatttattaataagtttataattataatgattatgcattgcatgagcttaaagataatcaatcagtatatagaaattaaagttgttacccttttaagaaatgtgttacgccgactgaagtattttactcggtaatccatattacttcaactataatattgttaagcaaatttatcaataaagttgatataattattgtaaagctgtattaatatgtagtagtgttaatacaaacatggattactaaaatacttatttataatttaattatactcattatttctgaataaacacttaacagatttcaaggtgttagctttcattaaaaagttcattacaatagggatatttttacggtatattacatcttaaagtcttagaatctgcaaatatttttagcatatattataaagtatattggttattcatataattaaatagatttggcaaatgattataaaatattattgtattgcaaaatatagttcatgtaatttttagtaaactatattaaatacaatggtccttttattaaatttgagtataacaaatatacaggagaggtatagatatgataagaccaaggcctttaaagaaaggtgatagaataggattaattgcagcctcaagtccaacaaaaccagatagaatagaaccgtcaattaaagccatggaagagctaggatttgaagttgttttaggaaagagttgcaggtgcaaccatggatatttatctggaagtgatgaaatcagagcaaatgatattaataaaatgtttgatgataagaccataaaaggtatttttgcaataagggggggatatggagcaggaagacttttggacatgctggattacaatatgataaaaagaaatccgaaggtttttgcagggtatagtgatgtgacagcgctccatactgtatttaatgaaaaatgtaaatttataacttttcatactccaatgatatcaaccgaattttataaaggtgtagatgattatacaatggattattttataaaaaatatatttagtgataaaccattaggaatactaaaaaatccagataaacaagaaataaaaactttagtaaacggaaaagcaatagggaaattggttggaggaaatctttctttagttgcatcatctatgggaactccatatgaactcgatacaaaaggaaaaatactattcttagaagatgtagatgaatatccatataaaatagatagaatgttacttcaattaaagcagtgtggaaaatttaaagatgctgcaggaattattttaggatcatggactgggtgtgatccaatagaagggaatagtagtttaacattaatggagatatttgaagaattgataaagccagaaaatactccgacaatttataatttagcttgcggacattgcgctcctactataagtattccattaggagcaaaagtaaagataaacggagaaagaagcgaaatagttattctttagttgattattaaacattatacattggagtgatttgatgaaaaatgcaatagttaataatactataggaatgttaaaacgtgagccaaaaaataattcggaaagtgtagatgaagtgctattcggaatgaatgttgaaatactcaaagaggacgttaataattggttttatgtaagaactcgctacaattacaaaggatatattaatggtattgatttaataataaatgataaaatatcagaaaagtgggaaacagaaaaaaattcaatagtaattaattcttttgcagatattcttaataatcctcaagcatctgggtttccaattgcaactctgacaagaggagctaatttaatttctacctatgaatgtagtaaagacaataagtttacaaaagttatattgcctaatcatagtataggctggataagaagttgtttcatatccaatttgaagaaaagttatgatataaataatgaagaaggtcttagggataatttagtatcatcggccgtatcttatattggaacacaatatagatggggaggaaaaactcctcttggaattgattgctcgggtctctgctctatggcatatatgttgaatggaattctaatttatagagatgcaaaaattaaagaaggttttcctattaaagaaataacatttaagcaaataaaaaaaggagatctaatattttttccgggacatgttgctatgtacttaggtaatagtaaatatatacattcatcaacaagtaatgatgtagtaaaaataaatagtttaaataaaaattcaaatgactataacgaacatctagatagaagtttaaaacgatttggaagcatattttaaaagtggtttcataaattatgtaatatgattagcatattggattaatatttattctatgaggaaaagaggcaaaatttacacgactattaataattaaaaaacacataatatataagtaaaatatattatgtggaggtaatgatatgagaacactttcggaagcagaaattttatctttaacatcagttttaaagatggagagtgatggattagcaatgcaaagagctgttaattcattaattacagatggagatttaaaaagacaatcagaagcaagtgtattagcaactgaaggcaggataaaaggaattcaacaatttatgaatgaaaatggagttccagtttcaaaggaggtattgtaaaatgggaagtataattggaaatatgattaaaagcactatggatatagatgatgaaataatagcatcaagtatgctttctacagcgaaggaaggtgcagatatgtatctaaatgcaacacttacaagcagtactcctgaattaagagctatatattcagcctcattaggacaaattgttgaaggacatacagctcttacagaattaactgttaatagaggatgggtaaatccttatgattcgccacttaaacaattagcaaattcttataatgaatcaaagcatataattagcgagatcaaagaataataaaaaatagatttcaacaaaggtgcctattttaatgttaaggtgccttttttaatagttaaataaaatattaattatcaaataaaattatcattgaaatagttattaatttaatcggccattttaaagtagatctatctatagaaaattaaatagttataaaatttaggcaattttatataaatgcaattacacatttgatttatagcatcgtaagtaatagaatagtagtatgaattgttaaatatatacaattcattatttaacattcggtattatttaatgctaaattgtatatgaattgattttgcattgttgcataagaaaaaagtatcttaaatatatcaaaaatatgagcaaatataccaattttatattgcttattatagccaataatgatattcttaattatatgataaataatttcatttaggaggtgtcattattatgagtatttgcagtttaaatccgggagagaaaggaataatttcatctattaaaggagattcaaaattagttaagaggttgtttgcgttaggatgcattgaaggaactgaggttgaacttagaagaacagcaccactaggtgatccaattattataaactttagaggctttgatttagcaattagaaaaaaagatgctaagaatatactattaaaaaaattataataattgtggattggatattttaattattagcaaaataggggagacttaaataaatgataaacgtagctttacttggtaatcctaatgtaggaaaaactacattatataatttactcactggctccaatcagtatgttggtaattggccaggtgtgactgtagataaaaaagaaggttttcttcttgaaaatattaagattgttgacttacctggaatatatgctatggatactttctcaaatgaagaaaaagtgtccaagcaatttctagaagaaggtgatgttgatttaatattaaatattgtggatgcatctaatcttaatagaaatttatatcttacaactcaacttaaacaatttaataaacctataatattagccttgaatatgattgatgtttgtgaaaataaaggaattgttattgattatgataagttgtctaaagaactggatgttgaagtaattccaattattgcaggaaaaaatgtaggagtagataaagttaaggaaagacttagagaaggaaactttactaaaccattgaatcatagaaaatttgatttttcatctgaaaaagaagcgtataaatttatagaaaatgtattaaaatcgagtatgacaataagagacaacctacaagaaagcattactgagaaattggataagtttgttttacatccagttctagcatatcctatttttcttttacttatggctctaatgtttcagttgacattttcttgggttggacaaccaatttcagattttttagatgatcttttaaataataatattataccgactgcgcaccaactattatcgaattcttctgattggtttagttctttaattgttgatggtattatttcaggtgttggagaaattatagtattacttccaataatattagtattatttatatgtataactattttggaagatagtggctatatggctagagtcgcatttatgatggataaattgatgagaaaaatggggctttcgggcaaagcttttattcctatgataataggttttggatgtacagttccagcaattatgactgctagaactttagaaagtgaaaaagatagaaaacttacagcattgctagttccatttatgtcatgtaacgccagacttccagtttatactgtatttgcggctgtattctttgaatctcatagaggattagtggtatcttccctatatttacttggagtcttagtagcatttttgcttggtattttattcaaaaatacatatttcaaaaaagatgaagaaccttttataattgaaattcctgagtataagatgcctaaaatatcatctatatataaacaaacattagataaagctagcggttttttacaaaaagctgcaactattatctttgcaatgagcgtagtagtatggtttttatcgaactttaatcttcatggtatggtgaatcaagttgatgatagtatattagcatcaataggtaatgttctcgcaccagtttttaaacctttaggttttggtaattggcaatctgcagtatcattactttcaggactactagctaaagaatcagttttagcttctatgcaagtaatttttgcaggggatttatcggtaattttaccaattcatttcactaatatttctgcatatgcatttttggtttttatactactatatactccatgtatatcaacaattggtacgatgcaaaaagaatatggaagtaaattaactttgttttcaattttctttcagttaattgtcgcatggattgcttctttcttagtatttaatttgggtggttttctttataaccttgtgcatttatttttaaaagcgaatagtttgtttttttaataattgttaagaatatgattaagtatcaatatcaagacttaaatcatacttttataatagcaggtaggtgaagcttaaatgatagaaatattaatcacgattataataatttcttttgctggatttataatctttaaatcttttaagaattcttcaaaaggaaaatgcaactgtggatgtaaaggctgtaaatctgagaaaatctgttcagacaaaagtaatacaggtataaaaattgctcaaacaaataagcctaataatcaataataaaaaatattaaatatataaatttatccactaaaagcatagcgttttagtggatttttctttatactataaaatgatttatagtataataacaaaatgaagaaatttaaacctaagataaaatgagaaaccgaaagtaggaattaaaaaatgaattacaaaacacatatgaatggtggaatactagtaggattatatgcgaattgccaatttgcaaatatgccacttgtgtctacagcagtattacttggaggagcttttgttgggagtatatttccagacatagatcatggaaatagttatattgggaaaaaaactaaaggtgtatcaaaagcaataaataaattggctggccatagaaagttatttcatgcgccacttgtatatttgtttttatattcgactgtcattggtatgtttacagataagcttatgttaattggaataaagggaatattcttggggatattttctcatttatttctagatagcctaacgataggaggattgccgtggttttacccatttagtaaaaagaggttttctatttgtatgataaagactaatagtaaaatcgaggatatattatgcggaatgcttatatgtattaatatagtaatgttacttgatatgcttcacataacttcaatatttacattcacacatagataaaatataaaaaaatcgcaggcgactgtggagctgaagatttttttcacgcatctgccttttcgaacgcatgtgagaaaaatttggcaggcgaatatgatttgttttttattcttttatagttattaaccctagtaaaatatactactataaagttatccacagatttaattgcattataattccctaaagaataaaaatatcctaaagattgattagcaaatctttaggatatttttataaggtacattatgttggaaacaataaatagcatattttaagcacttaatagcatataatataattttacttcataaaatttaattcagatttatcactatttttaatttctcttatagccaagctacaatagattaatgtaataatggagaatataagaaaaaattctggcattattattccagcaacatgtattaaggcttcaagtaaaagtggtaaactcatcgcataaaaacttaaagtacaagctctagagtattttagttttactcccataaatgaacctatagaaacagcaaatggaccaaatattaagaatcctaaaatcaaattagtaataaaggaattaataggattaacaacaaaaaaaactattggtgtgagtattttaattatggaaagatagtatcctgaattttcgttattaatatttatactagaaaaatcagaaaagttgatagtgccaactgttctataatcttttctaagatatatgttattagaatcaagaaacacagcatctttgtaagaatttagaatatttttgtcagttttacctttagtatcaataataaaagtataataatttgattgatcagtacttacacttagcattgagtcatcaatactaaaagttgaggaatcattttcaaggttgtcctgaatacttatggcatcagagtcaagtgaatttactgtatttatgtttccaataaagcttgatattaaataaaatagaaaatcgccttcatgtttattgtaaatagtttcatctgaatcaacagataatacgccattattaaattcaaaatttggtgcattatttgaaagatcattttgtactaccgatatttcgctagcaatcatatttatttccttaacattagttattattgaaaatagtaatgtaacaagaaaaacatataatattgactttctaagcccttgtgctaagaattcgctgtatgcttcaaaattaaagaaactataagcgaatttatctttaaatcccattatttttttcaaaaaaagacctcctaaaagaaaagttatataaatttaactgattcttgataattataacacattggataaaaatacaatagaaagtttgcataattaaatgaaatatgttatcattaccaatatcaaaaaattttatgaaaaattaaatacggacagttcattaagaccatcctgtcattaaaaaaaactaggcattttgattttgaattattttaatttaagattaattttgttgcgctagttttagatgttacaaaattaatcttttttatatttaaatggaaagttaatttatggataagccttataaaactgatttcgaaaattttatagaaattatgtgaggagaaaaatatgtttaaaataaaaagtgaagtacaatttgatatggcgcactatttaagtgggtatgaaggaaaatgttctaacattcatggtcataggtacaaattaattgcaaaactaagatctgaaaagttgcatcaagatggtcagcttagaggcatggtagatgatttcggaaattttaaaaatatattaaaagagattgcagaaacttttgaccataaattaattattgaaaataatgaagatgggaaagctttggttaagaaactcgaagaactacaaaataatttcaacatttatttagttgactatagacctacagcagaagaaatgtctagagatatttttaatagattaaaagctaaaggattgtcagtgtgtgaagtagaattatttgaaactcctaataatagctgcatttatacagaggactaatggaggggaattatgtttaatataattgaaaaatttttatcaatagatggggaaggtcctacttctggtgaacttgcaacatttataagatttcaaggctgtaacttaagatgttcttggtgcgatacaacttattcatgggataaagaaaatacttcagaagttctaactgccgaagaaatttataagtatataaaagaaaataaagttactaatgttactttaacaggtggagaaccacttattcaaaaaaatatacatgaattactagaacttttgaactcagatgagaacttaaaagttcatatagaaacaaatggtgctgttaacataggaccttttaaaaataaatttataaagaataatatcagttatattgtagattttaaacttcctagcagtaatatgatggatagaatggattttaataatttaagcattgtagaatccaatgatgtttataaattcgtgataggaagtaaggaagatttagaaatggcatatgaaataatatgtaagtacaatttaacatcaaaatgctttgtttatttaagtccagtttcgggaaatatagaaatgcaagaaattgtagaatttatgaaagataaaaatttgaatagagtaaggttgcaagtgcaattacataaaattatctgggataaaaatgcacgcggagtttaataattgagtggttattatatataatatagactagcttatagtgaattttgtttttacaaaaggtttagaaatacaaggaggcttaagttatgccaaagaagatagatacaaaaaaaatagaagaatgtataagagaaattattgttgctttaggagatgatcctgatagggaaggattactagatacacctaaaagagtatcaaaaatgtatgaagaagtttttcaaggaatgacactttcaaacagggaaatagcagaagcgtttggaaccacatttgagaatgaagattatgattcagaaactcataataatatggttgtggttaaagatataccaattcatagttattgtgaacatcacttagcgcttatgtataatatgaaagttacagtagtatatatgccaaaagataagataattggtcttagtaaaatttcaagaattgcagatatggttgggcgaagacttcaacttcaagaacgtattggaacagatatagcagaaatagtttctatggttacaaaaagtagtgatgttggtgtacttataactggagagcatggatgcatgacttcaagaggaataaaaaaacctggaacattgactacaacaactacttttacaggaaaatttcaaactaatgatttactaagacaagaagctttactaattatgagataagtaacgaacgaagaagcagtagtgctttggtatatttctatttaattaatttattttaggaggttttgaatatgagtaataaagcagttgttgtatttagcggaggacaagattctactacatgtctattttgggcattaaaggaatttgatgaggttatagcagtaacttttgattataatcaaaaacatagaaaagaaatagaatgtgcaactagtatagcaaaggaattaggaatagagcaccatatattagatatggggcttcttaatcaattagctcctaatgcgcttacaagaaatgatatagaaataaaagctggagaaaatggttctcttccttcaacatttgttgaagggcgtaatatgctattcttaacttttgcaggagtattggccaaagtaaaaggcgcaaaacatatagtaacaggagtgtgtgagactgattttagtggataccctgattgtagggatatattcataaaatctcttaatgtaactttaaatttagcaatggattataattttgtagttcataccccattaatgtggatagataaagccgaaacatggaagatggcggatgattttggaaagttagagtatataagagaaaagactcttacttgctataaaggaattgttggcgacggttgtggagaatgtcctgcttgtaagcttagaaaaaatggtttagataagtatttagaaagtaagaaaagtaaaaattaaaatataaagtataaaatataaaacgaatttaaggagaaaaaataatgagtgaaagtggaagaaaatcaaaagaacttgagggtataacattgctcggaaatcaaggaacaaaatatgattacggatatacccctgaagtattagaggtctttgaaaataaacacccagataatgattattttgtaaaatttaattgtcctgaatttacaagtttatgcccaattacaggtcagccagattttgcaacaatctatataagctatataccaaacataaaaatggttgaaagtaaatcgctgaaattatatctttttagttttagaaatcatggggattttcatgaagattgtatgaatatcataatgaaagacttaataaaacttatggatccaaaatatattgaagtatggggaaaatttacaccaagaggaggtataagtatagacccttattgcaattatggaatgaaaggaactaagtttgaggaaatggctaattatagaatgatgaatcatgatatgtatcctgagaaagtagataatagataataacctaatgtattgcataaatgatttgtactaattagcaaagtaatgactgcaatacatttttattaaggagctgatatttaaattgagtaaagtaattgttataggtgcagggcctgcaggaatgatggctgctatacaagcggcgaagaaacatgatgtaatattattagatggtaatgaaagaattggtaaaaagctttttattactggaaaaggcagatgtaatgttacaaatgcaaaagatatatctgagttttttgagtatattccaggtaatcctcattttctttatagttcattatatagttttaccaatgatgatacaatgaatttttttgagaacgaaggaattaaattaaaagttgaaagaggagacagggttttcccagaatccgataagtcatcagatataataagaggattatcaaatgctttaagtagaactaatgtaaaaataagattgaaatcaaaggttactaatatagaatttaaaagtaatagaattacagcagtagaaattaataatgaagaacgattgtctggagatcattttatttttgcaacaggtggtgcatcgtatccacttactggttcaagaggggaaggacaaaaatttgcaagtatgcttggtcataatgttactcaactaatgccagctcttgttccaatagaagttgttgattccaaaacaaaagaattgatgggcttgtcattaaaaaatgtagaagttatgattaaagaaaatggcaagaaagtagtttataagaattttggtgaaatgttatttactcattttggagtttcaggacctcttatattaagtggaagtagatttatagaaaaaggaaaaagatatactttgcatatagatttaaaacctgcattaaatttaggagaattagataaacgtattcaaaaggattttaataaatatttaaataaagattttaaaaattctttagatgagttattaccacaaaaattaattcctgtaattataaataattcaggaatattcgaaaataaaaaagtaaatgaaataacaagagaggaaagaaagactttagtaaagactatcaaggatttaagttttgatattaaaggattaagacctatagatgaagcgattgtaacttcaggaggggtagatataaaagaaattgatccgtctaccatgaagtctaaaataatagaaaatctttcgttcgcgggagaagttatggatgtagatgcttttacaggtggttataatgtacaaatagctttttctacaggatttatagcaggaagtaatatttgataaaaaaatatttccttgtttggaaaggtaaaaaattatataatcttaatgaaggcataaatttataggatttggaaatgaggagaaagttttgaaaatttcagtagcaatagatggaccggctggagcagggaaaagcactatagcaaaattggtttctaagaggtttgatcttatgtatataaatacaggagcaatgtatagagctgtggcgctaaaagcacaagaacaaaatttgcaaccagaaaatgttcaagaaatttgtaatataataaaaactatggaaatgcattttgaaaatgatgatttgattttaaatggtgaaaatatacaggataaaataactactccaaacataagtagtattgtatctggatatgctagtatttcggaagttagagctattcttgtaaaacttcaaagagaaatgtcaagcaaatttagtgtaataatggatggaagagatattggaaccgttgttctaaaagatgcaaattttaagtttttcttaaccgctagtccagaacaaagagcaactaggcgatttaaagaattgcaagaaagaaatatagagtgttcttatgatcaaatactaaaagatataatagatagagattataaggatacccatagggctacagatccgctgaaaaaagcagatgatgcaattgagattgattctactaatttagatattaatggtgttgttaatgtaattgcagagtacataggaaaaggaaagtaacaaggagatagtaatgagtaaagttattctagcaaaaaattcaggtttttgctttggagttcaaagagctgtaaatgaagctatacggattcaaaaagaacataattcgaaaatctatactttaggtcctttaatacataataatgatgtagtaaaatatttagaagaaaataacatattttctatagaatttgaagaaatagataaattaaataaaggggatactattgttataagatctcatggtgtatctgaagcagttttagatgcacttgaacaaaaggaactaaaagtcataaatgcgacttgtccttttgttgctaatattcaaaaaaaagttaagaaatattcaaaagaaggatatcatatagtaatattaggagataaaaatcatccagaagtcattggaattaatggatggtgtgatgataaagcaattatcactaaagatggtacttttgatgaagaaaatatgcctcataaggtatgtgttgtatctcaaacaactgaaaagatgaagaattgggaagaaacactaaaaaacttaagttatgcaagagaaatattagcttttaacacaatttgtgcagctactgatgttagacaaagaagtacgaataaaatatccaaaaaaacagatgctatgatagttattggcggaaaaaatagttcgaatactactaagttatatcaaattgctaaagaaaattgtgaaaatacaattcatattgaaaacgcaaaagatctaccaataagttttataaaaaataataatataaacaaaataggagttacagctggtgcatcaacaccagattggattattagggaggtactagatattatgaacacagaaaataataattttgaagatcaattatcattaatgaacgaattagacaaaagatttgttattggcgatgaggtacaaggagaaatactttcaaagactagagattcagttatagtttcacttgttggatacaagtcagatggagtgattccatttacagagttatctgcaaaagaggatccattaacatttgcagataaacttaatataggtgatactattaatgcaaaagttataaagctacaaaataatgatggatatgtagtattatcaagattagaatatgaaagagaagaagcttttaaagaacttgaaaaaatatattcagaaggaacaacatttgaagttaatgttaaagaagctagagaaaaagggatagtagcagattataagggagctagaatatttattccagcatcacaaattgacataaagtttactaaagataaaagtgaatatgttgggaaaaaattagaagttaaattgatagatttttctctaaagaatcctgtaaaattagttgcttcaagaagagttttattagaagaaagcaaaaattctgaagatgcaaaagcttgggaaagttttaatcttggggatgttataaaaggtgaagtaaaaagatttacagactttggagcttttgtggaagtcaatggtatagatggattattacacttatcacaaatttcttggaatcatatcaaaaaagtaagtgatgtattaaaagaaggtcaaattattgatgttaagatcattggtcttgataaggaagctaaaaagctatctttaagcattaaagagcttgtagctaagccttgggataatgctaaagaaaaatatccagaagggtctattgtacttggtaaagtagttagattaaatgattttggtgcttttgtagaattggagccaggagtagatgggttagttcatatatcaaagatatctcataatagaatagagcacccttctgaagttttaaaaattggtgaagaaattaaagctaagatattaagtgttgatgaagaaaataaaagaataagcttaagcataaaagatgtataaaacaaaaaagtagaaggaatattttttcttctacttttttgtttttataatggtgataataatctttatgaaattactttgattctagaaataggtaagatatacgtagattttaattatatgcataaggtgaagaattgaagtataatattactatgcgtaatgattactacatatctaaagttcgtaatgtttaaattttaattgttaggaggctatatacttatgaaacaaaataaagttactaaagtaaaatctttagtagagactaagtttttgagtttatatgaagcagagtatgaaaataaagttggaaatataagaacatggacaatagcatccagaaaaaataatgaaactatacaaaaacaattttttgagaataaagaagatacagcagatggcgtaataattgcagcataccataaagatgagaataagattgttataataagacaatttagaataccacttaatgattatgtttatgaattaccagcaggtctcatcgatccaggagaagattctattagtacaataaaaagagaattgatggaagagacaggtcttaggttagttgaagttatccataataaaagtcttgataaggtatatgtttctgcaggaatgacagatgaatcgttagctatggcttattgtacttgtgaaggcgaaataagtgatgaacacctggaagacgatgaatgtattgaggcacttctaatatctcaggatgaagctaaagagcttatacagagcaaggagaaatttgacattaaatgttttttgcttcttcaaagctttgcattactaggagaaaaattatttcaataataaaaaactggtatacgcagaaaatttgtgtataccagttttttttattatatgttttcctcgatgataaatttacatttaacactctaacaagcagggtgcttaattaagtttagaatgtagaaacttaattgtaatacatggatccatattaaatcatatatatattttcatgttatttaacaactgaatttaaaccgaaatatactaagaaaacaaatgatgtaaaatacatcagaatggatacttcttttccttttttataacacagcttgcaaataggatacaatataaagcctaatgctataccgtcaacgatgctatatgttaatggtattaatattattatcataaaactaggaaatagttcgcttaaatcattaaagtttaaatttttcaagttctgactcattaaacagcctattataattaaaataggagctaaggctacatctggtatgatagaaataaacggtataaaaaaaattgataaaagaaatagtataccagaaattaatgaaaccaaacctgttcgtcctccagctgttattcctgcagttccttcaactgttgatacagaagggcttgaaccgaaaagcgcgcatccaattgtagataatgatactgctatcatagcgttagaggttttgtctgattttttcagtattcctgaaacctggctatgaagtattccaatattctcaaaaacaagtactaaagttaatgaaaatgttccaacccagaatttaattgtatttattccagtaaaatctaatttgaaaagtatattactatattcattaaaatttggcatagtataacttataccttgtgtatcaacgataccaagctttatgcaaaatatagttccgactataattgaaattaaaaagcttccaggtatatttttaaggaataaaattaatgttagaatcattatgaatataaaagctagtacttgaatacttgtaatatctccaagttttaacatagtagaagaatcagatactataattttagatttttgaaatccaacaaaagttataaataaaccaattcctactgtaatagcttcttttaaattttgaggaatagcttcaataataaacttggataatggagttgttgctataagtacaaatattaatcctgagacaaaaactgaagctaatgcttggcaataatttaagcctagagtatgaactattgtatatgtgaataatgcattaattcccataccaggcataattataagtggagtattacttattaaagcaattaacaagcaacctacagctgatgatatagctgtagcaatgattagaggctccatagaaatgccaccatcacttaatatactggcattgacgataatgatgtaaactgcagcaacaaaagaagtcagtgctgctatagtttcgcttttaattgtaacattgttttcttttaatttaaaaaatctttccatcctttcaacctatctttcataactccctcaccctcccacgctaaaatgcgcatattaattataacatcattatcatttatgtcaacttttatatatagcttgaaatcttatacaattcatttatactccatagtattgcatgagaataagaaaataatgtttaatcacaaattttgaagagtatatttataattgatccttacgtatacacattgtgatttaaataagaaaagaatagtaaaacaacactaagagtagtaatatattactatacgtattttataaagggggcatacaagtatgtatacagaatttgaacaaataaacaaagcaagcataatgataaattcattatgtatttttaagaatctaaaagatgacagtgttttattaaaatataaaacactactaaagtaccttaatagcaaggatatatcagtggaagagggaattggattatatactgattttatttatgaactattaaacaaagctgatggaaaatcattaaaaaggtatataattgatatgatttttctcgataataatccatttactaaaataattgacgaacaaaattcatgtgataaactttttaatcaagtgcattatgagttaaatgctttgcagtacatatctagtatagaatcttctgcaattaaagatgctataattattaaaggaaatgttaaagagtttgaaataggtatagttaagccgcttatggattttgattctgacttggaatgtaatatctcaagcaaagctattgataagttaaaggtaaatatattaaattgtgataattggggagatgcattagagatcattgtagaattttacaagcaatatggtactggcatatttggggagtatagagcgtttgtatgggaacacgaagatggagcaccttatcttagaggtattgaatcaccagatccagttaggctagaaaacttagtagggtatgaatatcaaaaagagattataatagataatacaaaacagtttttaaatggatatcaagcgaataatatgctactatatggatcaagaggaactggtaaatcttcaactgtaaaagctattataaatgagtattatgatgatggcttaaggcttattgaagttgataaaaataaattatgcgattttacgaagataattaggatacttaaaagtaagaatttaaaatttataatttttgttgatgatttagtatttgaagaaggagaagctagttattcggctttaaagacaatattagaaggtggagtagagaatagatcaaacaatattctaatttatgcaacaaccaatcgaaaacacctagtaaaagaaacatttagcgaaaggtctggtgatgatgtgcatgctaatgacacaattgaagaaaaactttctctagcagatagatttggtatgactgtatcgttctattcgcctgatcagaaagaattcttaaagataatagatggagtagcagaagcaagagggattaaagttgagaaggaatatttgcatgcagaagcattgaaatgggtaagatggtataatgctcgttcgccacgaacagcaattcaatttataaattggctagagggcacattaaatcagtaagtttatattaaaagtttgtaatatgtttttgaatattctataactttttagctaataaagtgataagagctagtaaagaattctttactagctctgtttttttataataatttaagcattagttgttgtaggaggcgtatatactcttgtagcaagttcgtcgtctaacatatacaatgctgcagagttattttcacatctcctaatctttttaattatagtgttaaatgtattttcttcttcaacttgctcattaataaaccaattaagtaaaccgattgttgcatgttctttttcctcagtagctatatctgcaattttatatagcctgctagttacaatttgctcgtgttcataacctgcttcaaagacatttaggatattgtcaaaatcagaatgtggtttttcaatttgttctaaagttacagttccatttttctgaaatatgtaatcatagaatttcatggcatgaaataattcttcctgagattgaaccttaaaaaaattagcaaacccacttaggtcaatagattcgcagtaagaagccatagataaataagtataggccgaataaatttcaaaattaacttgttcatttagctttgtaatcagtttttcacttaacatactaatacctcccataaataaaaacattatcattaacacaattaaaaaaatccagaaaaactataccctatagcataaaaatttaactttatattctgaaatttttaactatatattaatatattacatcatataacataatttatcaaataatatttgttgttatattacataagtattattgcaaaactaataatataaataagagaggagatgatataaatgacatataataaaaaggaaaaaacaatacaaaaaactggtgatatgtcgcaatctaaagttaaatcttttgtagagagagaggagccaacaaataaagtggtatctagaggtagagatatcacaattaatcaaaaatattaaaattcaatatatctcaaaatattaagtaaagttaagattaatttattagagttatgtcatattaaagttacttgcatacattttgagatagaaattttcttattataaagatttatctagttttatatgataaaattagataaatctagaaagaattaaggaggacaagttataaaagaaaaatatcattatttttaatatataaatacaatgttattgtaaactactaaaaatatttatttgtaatatggaaggatagataaaatgtcgataaacagaagtgcaccagaaaatttttattatgataatgcggagaagaccaataaaaattttatttataaaaaccttaagagaagtaaatgttataattgcaacttttcaaattcaaatttcgattttgccagcttaagaggcgctcattttaagaaatgtaacttttttagatgtagttttaaaggagcagagtttataggatcaaatttaaaggggtgtaagtttagggaggctaaatttgaagacacggtatttgaaggagcaaatttagatggagtgaattttgaagatgctaaattcaaaaataccatatttgtaaactgcgatataactaaggctaagaatataagtgaaaataataagaatatcagaatttttgatacaatgccagaagttgaaataagcgatgaattagaaaagttgatttcaaatgtgatggaaaatgaatttataaaaaaatcaagggtttttgatactaaagatggaaaaataaatatgttatctttattaattctaaaagaaaaatttgatgaaccaacgcttttagaaggtctacattatattagatacgagattgatagagatttttatacattaagttatgttattaggcttatagaaaatatgtaattataagatgaggagtatttcgttttaaatgaaagctccttttttgaattctaaaaaaataagttagtaataatagatacgcgaaaatactttttttatgaacctattattttgcaattaatatatatttattgaatatctatatagtaataaaaaatgataatgttattatttttgaaggaagaatatagatggaaaaaaataatttaattaaaattaaatataataaatcttcaaaaaaagtaaattcaaataatttcaagatatatactcctgaaatgatagaaaagtataaagattaccaaagaagattattaaaaattaatgaggataaagtcaaggcaaagttcctattatatagaaaaatttataattactattctcaagaaaataatctagatattagtattgaaagaatttatatcaagtcgaagctagactcatatacgtttggaggatgtggaataggtgcatcaattttggcaggattaacagcaagtggtattttttcgtatatagataattatataaaaaaacttagtccaactttcttgggcatatatatcgtattgattttagtatttgggctcaaaattctttcaaatgaagacagtaaggtagaaatgtataatatgtttttagaagtattaaataatctagaatatgataaaaatgaaaaatgaggataattaaaataaggataaaagtctacaatagtgcacaatatattcttgtagaaaggaagtgtttataatgagtaatgaatcaaaatcaaaatcaaacaatcttcaaagcttttctagtacaggtggcactagtgattcagatttatctagcaaagaagaacttagagaacaaaaaagtgcagggtgtaatcaatgggattctgtaccacgtacttatgacaaagaagagtctacacataaacatgaaaaaactgctactaataatcaatggacatctacatctaagtaagaatttactgtaataaatgctactttaaataaagagggagtggatattatgagtgaagaaaagaaaaaacgtgagtctgataaaatgaatgatggttattatgattatcaaggtggatatatttcttatgaccctgaagttttaacagagcattatactgtaaaaggatttgaaggtaaaataaaagataagcaattatcagatagtaaatggtgttaatgaataaaaatataaattaagtatatatattaatataaaatacttaaagtttccttcatatagatttgctgttacctatatgaaggaaacgatttttatgaatcatactattatcaataaactacgatattatatttttaattacttaaatttttaaattgaaaatatcctaatatatatttatttatataatattctatatattaacacattgtttaagtctatcaaaagttgactataatttttgtaagatttataatttatttattaaaggggaaatgaggaatttttatggtttttttagaaaaattatctttattcaatatgaatcatttcagaagattatataataggagtgaagatgcatattcgtgcgataaaagcttttttgaaatttataatgaagaatcttttatagtaaaatatataattcgtaaacaaattagactttttagagttaatagggaatatgtgggatatatatggtacgaatatccttcgtataatggttttagtaatatatattctatatatttgaaagatgaatatatacatttaattaattctaaaatcttatcattctttaatactagtgccttcagattcgatatgttagcaaactcaaaggcttcttttataatgaaaaaattaaattttgatgttaattctaataatattttaatgaagataaggacaagcaatattaaaaataatttttatgaaaatagaatattttttaaacactttaaagaaggacaagatgaagagttaagatgcagaattcaaaattcggtttttaatgaaaaaaacagagttcctttaacggttgatgatatatatagggaagaagaggaagactattatataaaagattttggtgtttttatatgcaacaataatggacaagttatcggatatggtcaaattattttcaatagaggattttatactattgttaatttaggaatattagaagaatacagaaaacatgggtatggagagttattagttagatatctcatagacttatgttatagaaattctataaaaactgtttatataagagtggaaaggaataatttaaaagccttatctttgtacactaaaattggatttagagaatatcaatcttttattagttggtataaaaaaattaattaattagcgtcaggagttgtcaataagtataactcctttaattatgcataattctagtcttttatttagaattattatttgttataatactatagaaattgtaatttatacggaggaacaataatgaactttgatatagaaaaactagatagccaaatggctagtgatgaaaaaaaattattctttatacaaacttatggttgtcaaatgaatgaagaagattcagagaaactttcaggtatgcttaaaaggatggggtatgaaaatactgagaatagagatgaggcatctataattatatttaatacctgctgtgttagagaaaatgcggaaaataaggtttttggaaatcttggcgctttaaaaaagcaaaaggaaaagaatcctgatttagttattggaatatgtggatgtatgatgcagcaaaaagggatggctgacgatatattgaagagatttccatatgtaaacataatatttggaactcataactcgtataagtttcctgaatatttaaatagagttaaaacagaaggtgttcaaattaaagagattattgacaaggaaactgaaatagtagaggggatacctatagatcgaaaaagtgatattaagggctttgtaactattatgtatggatgcaataacttttgtacatattgtatagttccttatgttagaggtagagaaagaagcagaaagccagaagatatagtaaatgaaataaaagacatggtaacaagagggtataaggaagtaactcttttaggacaaaatgttaattcgtatggaaaaggattagaagaaaatattacttttgcagatcttttgagaaaagttaatgaaatagagggacttgaaagaattagatttatgacttctcatccaaaagatttaactttagatgtcgtatatgctataagagattgcgataaagtatgtgagcaaattcatttaccggtgcaaagtggttctgatagaattttaaaagaaatgaatagacattatacaaaggaacaatacatcacattggcaaaaaaaataagagctgaaattccagatgtaacattttctactgatataatcgttggtttccctggagaaactgaagaagattttagtgaaacattagagctagctaaagaagttcgatatgatgctgctttcacatttatttattcgagaagaaatcatactccggcggataaaatggaaaatcagataccagatgaaattaaacatgaacgttttaacagattagttgagatagttaatgcaggcatagctaaaggaaataaggatgcagaaggaaagacgtatgaagttttagttgaaggttatagtaaaaatgatgagtcaaaactaacaggtagaactaggaacggaagactagttaattttgagggtggggaagacctaataggaaaattagttaatgtaaaaatagttaaagctaattcattctctttaattggagaagttgaaaagtaaaaaataaatttatgatttaaataaaataaatttaaaatagtctgtatagattcttaataggagaggcgttataacttaccctaatagatcatacagactattttctttagttggttaaaataaaaatcttatgagtaaatacgaacattcgttctagaactataaaaatagcatttttgttcagtatacctattattgcttttataatttgaaaaaaatataaattataggtttaaagaactttaatgtgggatttatcacataataaaaataaaaaatatttcatgttgtgatgatatcttgtggaataaatgccatttttatcatctaagaacatttgttctgtgaattataagaattaatttgttattttttaaaatatatagataaacagcttaagaattagatttattagatgaatatattttcaaatttgctaagactttaagtttgtatattcacaagaaattataaatatatttgtggagaaaacatttgaaaatgagcttttaaaggttcttagttgtaggttgttccagcttagcttgtcaaactgaaagttggaacatgctaaagtggctacaacctgctgcttagaaccttaagcgatattttcatagcttttcggaacaaaatatttatgatttcggtaagttatcacataaatttagttttagagttggatatctataaagaagttaaacttatatttgattttagcaattgtttaattagttttaattatatctacaaatgaacattctattgctttttttagatcattaggattcatttctatttgggagcctatttttcctccactaaatacaattgtatcaaataataatgcgttttcttgaataaaagttttgaatatctttttcataccgagtggggaacagccacctctaatgtatcctgttactttgtttatatctttaacgtgaatcatttctatatttttttcacctgctattttgctggcttttttcatgtctaattcttcagcaactggaataacaaaaacataaaattctttagaatgaccttgagttactaaagttttaaaaacttgattaacgtctttttctattttgtgtgcaactgcaataccatctatcttaccatcattattttcgtagctgtgagttgtgtaatttattttgttgttatctagaattctcatagcattagtttttccttttccttgagccataattttaacattcctccgtaagttttaatttatatttactactaatgattagtgacattatttatttaaattatatcataaaagcagatatagttttttgttttaagattatttctatatttgaattttagatacaaaaatcatctgaatttgattaaaaaccgagtttgattaatatgaatttgaacttttgttaaatgtagaaaatatagtatcgaataacgttcgaatttatttttttgtcagaatcgaatagtatttaatggaaatataattgtgaaaatatgagagaaaacagtgcaatgataattattatcattgtgtggagaaaaagaaaaaacttaatagtgtttaaaattaattttattatatgaaaatcattcgtttttttatttcaaataaaattaaaaaatattcctttggaatttatggttgaagttataaattttgattaagttttaataatcaaaagtgtttggagaattgaatcgtaaaagcttattataaagtattgatgataaatagtttttaatgagaaagcacaggaataattctgatattgatttaaatgcaaagactaaaattataataaaatcatttaaattataataaaaatagctaataattatttcgctaaatatacatttagcgaaataattgcataaatttatgatatttgatataatatttttaacttagtataaaattactttattagaataaattttatcaatgatgatttaaattattaatatcgtaacttaattaataagaaatttataaataatgcaggtggaaaaatgaaatacgatatccaagttcttaagaataataatctgccagaaagtttagttgattttttaaattatttagagacaattaaaagtacgtctataaatacaattgatgggtatagaatagatttaactatattttttagatttatgatgatttataaaggaaaggtgaattctgattctgttgagtttgaagatatagacataagcgttattgatgatgagtttttaaggggcataaaacttagagatttgtatgcattcctttctttcacagagaaatacagagacaatagttcgtatgctagagctagaaaagttgctactttaaaatctttttttaagtttcttttcgggaaagctaaagtgatcacagagaatcctgctttagagttagaatcacctaaaataaataagcgtcatcctgtatatcttactctaaatcaaagtattcatctattggagtctttaaacaaaaacgataaaaactactccagagactattgtattttgatgttctttttgaattgcggaatgagactttcggagctctgtagtattcaaattgataaaatcagagatgatactcttactatcataggtaaaggaaataaagaaagaactgtttatttaaatgatgcatgccttaaagctttagcgaattatttaaaagttagagatgactctaaggctttgccggataataaaaagtttttatttttatcatctagaaatgttcctataaataaacgtacggttgagataatgataaaaaaacatataacaaatgcagggttaactgatgataaatatactccacacaagttgaggcacactgcagcaactcttatgtataaatatggaaacgtagatataagaagtttgcaaagtatattgggtcatacaaatatttcgaccactcaaatttatacgcatgttgatgatgattcgttgagagatgctgtaaaatcaaatcctctttcgaaattgtaaagttttattattaaaatttataacaaaagatttctactactctcctactatgctttggtatggtttaaatttaaaaaataaaaggttactttattttctatcgtaacctttttgtgcttaatataaatattcttagtgttattgtcttagtgtgttcccgtacatttttccaaactcgtcaatatatgcaggctcttttccttcataaactataagcgtatttccttttctataataatgagggttcgtattggtatccacattattgccgctagcagtcattccgtttggtacgattctattaatatcccattctagctctgttggagaattatactcgtatattctaactatatctccacctaataaataatcagtttcatttcctttgaaataatcatttttgttagtgttagttgattctttgacatcatatccggcatttgtgaaatcgtttttaaaatcggcggctctgtatgttgtatcattagtagttagccctgttctatccctcgtagtatctgaatttgatccagctacgttgttttggttagtatctcctactgcattattttgattggtattccctcctatagttccatttcctgttccgccaattccatctgatgaacttccattattagaagttccgccttgcatatttccactagttccaccttgcatgtttccgccagtaccattttgaaaattattagcaccagtacctgttccgtctacacttccacttctaatgccatcgtttgttatgtcgttttgtctagtggcatcattatttgttcttgacatgttaccacacccaaacaaagatattgaaaccaaaagaattgctgttaaatttaacgctaaaatagattttcgcttcataataattcatcctttcttgtgaaatattctacgaaattattatgtgaaataaagcgaaaatctatgcatttctttattgtagtctacaagcttcttttattcaattgatttttttaatcttctaactccaggatagacttcttctgtcatttcatcaaggaccatatcatcagctaaactgatttcatctaaatattcaatatgatcaaaagcatcttcgtaagcactgtcttcaagattaaaatcatttaagtcaatgtcgtttgatgtttttgcaaagttattatatatagattttaaatctaatttatcttcgttaatttcatgtaattcatcttcgtttaaggatgcttttaagtcatttaaaaattcttcttctagtaattcattttcttcttgtgttttcgcaatgtcttctattttaatggcttttgtatctatgccgttcatttgcaaacacttaccacaattatcacatattttattttcatagatatcgcaataatcgtcatcagtatatttatatgtcatttaaaacacctcatttttttattatggaaacttaattatatcaaaaacaataaattaaatcaaattttttatcgaagataaatatctaataaagaataaaataatttaacatagataaattattttattcgatctaattgttcaagctaaattatatcatcccattctatatatttactaagtataccaacagctttttctaagtaagtcttttctacttcagtaaatctttcgaattcttcactatccaagtctaaaactccaataagattttcttctttaattataggaatgactatttctgaatttgaggcagcatcacacgctatatgtccctcaaaattatgtacatctttaacaagtaaagtttctttttctaatgcagcttttccgcatacccccttccctatttcaattttggtacaagcaggcattccttggaatggtcctaatacaagagtattatttttaaccaaatagaatccacaccaatttattctatctataagggcattaattaatgctgatgcattacaaagctttgttattggagaatcttcatctccttgaatcaaaccttcaagcattataagcatgttgtctaatttgctttctgtactcatgccttcaaaaattttaatatcaaacatatctactaccgcctcactttgaaactattgtccaaaaaataattttataaccttagttattctactataaaataatactaccatttttaattaattggaatacttagttaatatattgtattccaatttagtgttgtatctaaaccaaatacatactacctataaacactttagaacacaagtttgctatgttatatagtatatgttataattattagaagaatagtgaggtgtttgtaatgtcagacgaaaaagataagcaatcagagatatatgaatttttaaaaagttatacagagagcaaaggttatccaccttcagtaagagaaatttgcgaagcagtctctttaaggtcaacttcaactgttcatggacatttaaaaaggttagagaaaaagggaatgattaaaagagatccttctaaaccaagggctttagaaatagcagaactttcaatgccaaaaaaagaaatgattaacattcctattataggcaaaattacagcaggttctccaatacttgcaactgaaaacatagaagacacatttacgcttccattggattttataaaacatgatagagaattgtttatgctgcgtgtttctggtgaaagtatggttaatgcaggtattagagataatgatttagctattatagaaagtgcacaaacagcgatgaatggtgatatagtagtagctttaatagaagatagtgctacaatcaaaagattttttaaagaaaaagatcatattagacttcaaccagaaaatgatgctatggatcctataatagtagatgattgcatgattttaggaaaacttgtaggtatattcagatctttttaaacaaattactttgttattgatttcgaaattatattataagatagtaaattaatagactattaaattttatgatctataaaacttaatagtctatttttaatttcatacccacttacatatttgtaagctagtgataaattaatgatattatctatctacttctaaaactttgctcaacccaataagtattcctatttttccgtgatcaaagtttaatccaccttgaatatatgctatatatggctctctaactggtccatcagctgataattcgattgttgaacctgaaataaatgctccagcagccattacaatttcactatcatatccaggcattgcccatggctcacacactgcaaatgcatctataggagatccggcttgaataccactacaaaaattaattaattttttagcgtcgccaaattcgattgcttgaattatatcagttcttttatctgttgatgaaggaaataccttaaatcctgcaatttccattacacgggcgcagaatattgctgtttttacagcttctatggctacgtgaggagcggagaacaatccttgatacaaacttctcataagtccatatgtagcgccatattcgcctcctacaccgggtacagtcattctattagcagctgcatcaacacactgtctctttccaacgatatatcctccacctggagcaatacctccacctatattcttcataagtgatccagccattatatctgcaccatattctgtaggttcaacaggttcaataaattctccgtaacaattatctacaaatataattacatcttctcgtatttgtcttatatgtctaataacttcagctatttcagaaactagaaaagattttcttgaagcataaccggtgcttctttgaatatgtataagtctaatacttggatcatttttcaatgcttcttgaattttatcaaattgaaatttaccttcattatctaaatctactatatcggttttaattccatattgatctaatgaaccggcgtttttcttctctgatagtccaagaaccccaagcaaagtatcataaggaagtcctgaaacacataagatcttatctccaggcctaacattaccagcgatagcgcatccaatagcatgtgtaccactaacaaaatgtggacggacaagtccagcttcagtattaaagatattagcatatactttatctaatgagtcacgccctaaatcatcaagtccataacctgtagtgtttgtaaagtgagagtcgctaatcttttctaattgaaatgctttcagtactttaagttgattaaattctctaatttcatcatattccttaaattgagcttcagtatcatataaagcctgtctatatatttcaaatgtcctttcactaatattatagttcttaattaaaaattcttctgtcttttttaacatatctaagtctcatcctccaaagtttagaaatactcaaaaataaataggcaaaaatgcctatttactaagtagtttcgtattcgttatctgcaaataaaattggtttagttggcgttatagttgatattgcatgcttatatataagcatttgcttattatcgcaatccaaaataacagtgaaattatcaaaaccctttacagtaccttttaattggaatccatttactaagtgtatagttatttgtattttattttttctcgcattatttagaaatacatcttgtaggttgttttgttgcttattgaccaaaatataacacctccataagtgattttattactaatattataacgctagttctttattatgtcattaataactttatctaaaatttcatcatcactcataatatctttatctaaaaatatacatcgtttatcacgtctaaaccatgtaagttgccttttagcgtaatttcgagatccttgttttatcatatctattgctttatctaaggttattttaccctctagataatataatatctctttgtatcctatcccctgcatagattgaatatctgaattatatcccatttcttttaatcttatgcattcgtttagcaatcccttttccatcattaaatcaactctcatattgattctatcatataatttttctctattcatagttagtacgtaataatatacgccataatcactattataaaaatccaatccaacattatatgagctaaaaggcttattagtaagtttaaaaacctctaacgctctgataactcttttcctgttgttagcatgaatttctttgtaacttatagggtcaacatctttaagcatttcatgtatatattcattacccttttctaatgctaaagtttctagatattctctataactttcatctttttctgcttctgtaaaagtcatgttgcaagttaatgaattaatgtataagcctgttcctcctgatattattggaaattttccgttacatataattttttctaatgcttcttcaccaagttgcttaaaatctgctactgaaaaaggagtatcaggttctattgcatcaattaaataatgctttatcccgttcatttcatccttagttacctttgcagaacctatatccatatatttatagatttgcatagaatcagctgaaataatttctccatttaaattctttgctaattttattgaaagatcagtttttcctactgcagtagggccaccaataactaataatttttgcttcattattttatcccttcgttaataattttaaagtttatattcatttagaataatataaaaagcattatattattcttttaaatttcttatcaatgtctatacttgtaaattttattattacaggcctcccgtgtgggcagtgaaaaggatcatctatatatcttaaatcttcaattaatttaatcatctcattcatttctaatttatcatttcctttaatagctgctttacatgctttagtagcaatagcattatgtttaacttcacttgttttaccgtttcctaaatttttcaaattatcaagtatatctaggaacaagtttttaggattaagtcgtcctaagaagtacggaacttcttttaaagataatgaatttccaccaaactcttctaataaaaaaccagcttctttaaatatttctttattctcttcaaaataagaataatcatcaatacttaaatcaattatacttggaacaataagaggttgaattataatagtaccttcttcaatttctttaagatatttttcaaataatattttttcatgagcagcatgctgatcaatcatgtataaggtaccgtcatactctcctaatatataagttttattatattgacctattatagtaattggtggaaacttagcaataggattttgcttaatattttcgtatttgttttctgtaattacgttttctataggttcagaattagattttatttcatcttctgcattgtcattataatcatccaccaaattttctatatatgaattagggttaaggtctacaggaatacttataggctcatcattttcctcattataatcagcgctttcctcaactattgttttattaatattattcaagcttggatcatatacacttttaaagctactctcgttattggccttgaggtcttttctttgagacaataaagtctttgctgcagaacttgcaaatttaaccttttcttcttcttcttttattttaaaagtaatctcctcaaatgttggtagtggctctttttttgtattttcttcttcttttatagcaaaagtctcaaaaacttcattttttaatgcagtatgaactgctccgaagatctttttgaatatcattctttcatcattaaattttatttcagcctttgttggatgaatattaacatctacatattcaggatatacttctataaataatataaagaacggaaatttatttactgttgaaaatgacttaaatgcttgctctacagctattgctaacgccctgttttttatgtatcttttatttacgaaaatactttgattatttcttgatcctctagctatttcctcagttcctacatagccataaacagttattaaatccgaactatcactaaagtatagtatattatctgttatagatttaccatatatagttcttattacatcctttagatctccattaccaaaggtatgtaatacttttttgtgattattatacaatttaaaacttattttaggatttgcaagtgataatcttgttactatatcatttattaatgaactctcttttgatacagattttaagaacttcttcctagcaggaacattaaagaatagatcttgcacttctagtatagtacctttatttattccacactctgttacttctgatgctttaccgccttcaatagatatttcatacccaaaggcttcttcatcctgcttagactttaaattaactttacctacagatgctatagatggcagtgcttctcctctgaatccaagagtatgtatattataaatatcttctgactcttgtatcttgcttgtagcatgcggaagaaatgctttcgctatatcatctttatagattccgtctccatcatctattattctaataagagaaattccaccttcttctatttcaatgattatgtttttagaatttgcatcaattgaattttcaatcaactctttgactactgacgctggtctttctacaacttctcctgctgcaattttatttgctgtgtcttcatttaatatatttattctcttcaagatgtcctttcctcctttcaatgcttatgggcgtaaaatgcaaatgagaaaatcacttccaaataggcgttcctaatgaacacatgaacttatttctaatacattgttattattgcatacttgtttaatatattcaataatattgaaatactggtataggaatgaggtataatccgaatatatctttttgactatgctttttatttgtatactctaaatgattttagtatttctattaatatttccattagaacaatattatatttaatttacatataagtaacaatctaaatataaaatatatttacaataaataatatttgctgttaatatggttaagctaatataagaaattaaatatttcttataaggaggctttaatatgaatgataaagatttttataattcaactaaaagtgtatctgatccagcatcacaaaattataataaggtagtaaaagaaaaagcacatcaagaaagtccatttggggaagctgagccttcttctcatactgaatttaaaaagaaaagacactaaaattataaatccacgacaaaaattaataatgtcgtggatttatgaactttaaattaaattatcatctttcaatagattatataatgtaggattaaaattaaattgactaattaaattttcaacttctaataaagctttttcttttttatccttagatatattagacttagatgctctaatcaatatatttttaggcgaatgtgcaatatcaataaattctaaaagttgtgttttgtatcctatgctttctaaaaggttagctctaacagaatcagtcataagtgcggcaattctttcttgaactattccatactttgttaatatagaaagagaatctgtcttcatttgggcgttaaattcatgctggcaacatgggacagagaatattaatttggcattccattttatagcgttatataatgcataatctgtagcagtatcgcatgcatgtaatgttattaccatatcaactttattattatatttaaatccatttatatctccaagttcaaagtgcaaattttcatagttataactttgggctatatcattacatttttttataacatcggctttaagatctaatccaatcatttttactttaatattctttatttctacaaggtaataatacaatacaaaagttaagtaagattttccacaaccaaaatctaaaacagtaagttctttataatcatttttcttgatttcatcatcaataatttcaacaaaacgattaatttgcttgtatttatcatactttgagttcactacttttccttctttagtaaatacacctaaatctattaagggctcaataatcatcccctcttttaatatataatttttttctttgttatgggatttgttaagtgttttttgattatcactttttttcttacttaataagaccttgcctttttttgatattttcacctcaaagctagtcgaatttgaccatgcagaaatttgcttataatttggctctacatactctataattctttcttccaaaacatctgtatcaatgttttcatggaacacctgcttatcagtatatttttctatttgatagtacgttctcttattattttctttgagatttataactattttattatattcaaagtttttatttgttttattgctaataactagctttataacatcgtcttttattatttctttaattgcttttttcaactcttccatacttcaactcaccttatattcaataatcttgtttactaacagtgttagtatattagtttttaaacctatttttatattttatattaattttatctataatactatgattatttatatataatttcagacttaaaatttttttagttaggccaatctttcaactacagcatacctttttttaacaattccttgaaagtatcccattctacaaattttccacccatgctttctaaatgctttgtatgcatttggcaatctataaatatgaaattttctttttcaagtttttcagcaagttttattaatgctattttagatgcattacttaccttagaaaacatgctctctccgaaaaagcattttccgattctaacgccatataaaccgcctactaattcattattaagatatgtctccacgctcatagcataacctttattaaataaattcatatatgcttttttcatatcattgcttatccaagttccctcattgttattttctcgaatatccttgcagttactaattacaccataaaaatcgttgttgaaagttacatgaaacatctctttttttataattttcttcattgatttagaaattttaacttcattaggcatcaatataaatcttggtttgggacaccaccaaagtatcggctcaccttcgttataccatggaaatataccattacaataagctaatatcaatctttctaatgataaatctccccctacagccaaaagtccatctttttccgagagctctggattaggaaatattatctcttttgttaatctaaatatgggcattatattcacttccttgcattctaattcttcttttaaaattattctatcatattctaatactcaaacatttttttgcaaaaaaataagcttgtaaaagcttatttttatattataaatacactacttaaatttattatttagtttgttattaaagaaaagtggtaatggtgaatatgttgtatctatacccattgcaattgaattttctgtaccttttgcaatgggatttgaaattgcatatcttgtctcttcattaacaattatattttctttatcagttttccttttatctttcatttacaatcacctcagattttattttgcctactattaaaataactattcagtaaaacatttttgtaatatataaatttccaacaacataattcatttaccaagaagctggacgaactattgactttggtaagattgtattagaatctcctttcgctgaattaatctgagattgcgtaatgaataagctatctttaagattagcacctctaatatctgcatcacgtaagtcagctccaataagatcagcataactcaaatcatttcctctaagatctgctgctatgagaaatgcccctcttaggtccgcacctttaagattaatctttttaagatctgcaccaatgcaatctagtctgcctgcaattgtttttttacgttttaagttagtttttctgttactaagtgcttttgccctaataaattcgcttgtttgtctgagtagtgtattaacattatctctatggacttttatatctagagtcataagcaggtcgggtgcagatttagtaatgtcttctgtttcggttattagattatttattttattttttatcttttcattagtttgaattgataaagcttgttttagataccacaacatttcatgaagctgtctcataatcaaaaaaacttcatacattttatcggataattcaggattttctctccaattatgtccagcatatgtgatttgagcaaccttttgtcctgcaccaaaacagtcgtaagttgtacaacctttaagtcctttttttctcaaatccttatgaatagagcaactaaaatctgcttgcaaatttaagcaaggctttccagcgtttttattgtttggaaatccgtctgaagccgaaaaatataatgcaacacagcaaaaaccaaagcatttttggcaattaattttcagatcttcaaataattcttcatcaaatgtattttcgttcatatatgtcaaagtaactcaccccgtaatattatatataatacagtcataacttatagcaagtaatttcgtactaaaatattgtattatgtatttaaaaactcatgttccaactgcatttagaattattttaacataattggaactattaaactactttaataggattagaaagtctttatttttaaagaagataaaacataacaatactttttatgatgaagtactgttatgtttttattcaaaagtattgatatacaactattatgaaataattgtattaattgtttaatttcttagcttcagcaactaacctatatagagtgttcatagcttccataggatttaaacttaatatatccacttcgctaacttcttttagaaatgcctctttttctataaaagtaaaatctaattgcatattgttagaagaatccttattcttatgttttttagatgaattttcagtcttttcatcaattctatgatcatctttattactttctgctttatcaaaagagtcttttgcttcaactttttctatatattgactcttactttcacaggctttttcagtaatagtaactacactattgcctccatttatatctagagcaacctcattttctataatttctgtatttgtaactttgtgtatatcaaaattattttcgccttcaaggcctaaaagaatttcttttgctctattaataacatcatcaggaagaccagcaagttttgcaacttctataccgtaagactcatctgcaccaccttcgactatctttcttaagaagattacactatctttcattttcttaacagctacagaataattcttgacaccaggtaaaattccttcaagttttactaactcatgatagtgtgttgcaaataaagttttacatcttaaattttcgttaccagttatgtattcaatgacagaccaagctatcgaaagtccatcataagttgatgttccacggcctacttcatctaacagtactaaacttttagaagttgcgttcttaagtatatttgatacttcccacatttcaaccataaatgtggatttaccaccagccaaatcatcagaagcaccaattctagtgaatatcttatcgcaaattgaaatattagcactagctgcgggtacgaaagatcctatttgagccattaacgtaataagagcaacctgtctcatgtatgttgatttacctgccatgttaggtccagttattaatagcaattccttatcactttgattcaaggtagtattattggaaacaaattcacctcttccaattaccttttcaaccactgggtgcctgccatctactatttcgataattccatcctcgttgatttcaggttttacataatcattttcaagagcgattaatgccaaggtggaaataccatctagattagaaattattctagcacttttttttagtcttgcaatttccttctcaatggaatctcttatatcagtgaataaagaatattctaagtttataagcttctcttctgcgcctagaattttatcttccataattttaagttcttctgttatatatctctcagcgtttgcaagggtttgctttcttacatacctaccttctggaatagaattataatttgattttgaaatttctatataatatccaaatactttgttataacctacctttaaagatttgattccggtaaattctcgttcacgattttccagagctgcaatccattccttaccatgaagctttgactgtcttaattcatcaacttctgaattataaccatctttaattatatttccttcttttatacttaaagagggctcttctttaattgaagattcaagtaattctcttatgtctgatagctcatctaaatcttcataatattcttttagcagttctgaattagcagttcctaaaagttcttttatagatggtaatttgtctaatgaagctttaagagataacatatcttttgcattcacatttttatttgaaattttaccgacaattctttctatatcataaatatcttttaaagaacttcttaaatcctcattaaaactaattgaactaaatgcttcgctaacaccacttagtcttttttctatttcagatttaataattaacggttcttcaatccattttctaattgttctaccacccatagatgtagcacttttatcaagaacccataaaagagacccttttttgcttttctctcgtatactttcagtaagttctaaatttcttcttgaatttccgtcaattgtcatgtaattaattatttcatattgttctagcaaatttatattagttaaactcattttttgagtttcatatatgtatttaagtagtactctgcttgcaatttctctttcatttactaatccagaaacctctaaatccgaaaattgatctataatttcttcttttgatacgataaattcattaaagtctttctctgtaataagtgcagtagttataccctttatatcatctattaaagattggctaatgtttttatctactaaaatttctttaggtgcaacctttgaaatctcgtctaataaggttatctttatattatcaaaggaagttgttttaaattctccagtacttatatccgaaactgctaaacctattttttcatcgctctcatatatagtcattaaatatgtattatcattttctagagaactattagcatctatgaatgttcctggtgtaattatttttacaacacctctttttacaattccttttgcttcctttggatcttcaagctgttcacatattgctaccttataccccttattaacaagccttggtatatatgctgccgctgcatgatgtggtattccacacataggagctctttcctcaagaccacaatttttgcctgtaagaactaactcaagttctcgagatacagttattgcatcatcaaaaaacatttcgtaaaaatcacctaatctataaaatagaatacaatcactgtattcctcctttgttttcatatattcaaccatcattggcgttaaagccataattaatttcctcctttttatgtagctaggttacactatttctcgacctagatttatatatttaatttaaggtaatatttatataaatttcattatacatctaaaaatccctagaacaattataacaattatcttagagattttcattaatattttatttaactgaaaatagatataaatatttatcttaaaaggatttttctaattttagtttttcttaaaattgtaattattaatgcagacaataataaagaacagataaacctaagaattgtatttgcaaaaagtactggtataaacattgcaagccatatcataactatttgatgggaacaatatattcctaagctatattccctgcagactttagaaaccttagtagaaatattttttgtggaattaattgcccaaattaagattaaaggagctgcaattattgatgatagatacatattagcgtccttagcaattccagttttatttaatacaaaggtttcaattaagagtaatataattgaaagtatacttagtaatcctgacttttgtatcttttcatttaatttatatttgctaacgagtgcacctaaagatataaaaagaattgattcggtaatacctatttgtggaaacataaatattgaagtatatccgttaattaatggatttatcatagttttttcaaacaacccataataggtatctccagttgtcccaaatagatataatacaaatccaattataaacaagaaaaacagtttgtctctttttaataatggggaaattataaagatagtaataattagcgaagatatataccaaaggcttcctgtaacccctgcaaataataatctctcaataattaaaataggtggagcacttaaactgcttaaggcaagtggaaataaagctataatctctataagcacccataaaaaatagatacgtaataaatgcttaatagttgatttgggttctttttcggaaccaattctattatataaaaaataacccgaaaccataaagaaaaatggcacagcgagtctagcaatacccatactagtagcaatccataagtcatcatttacggacttaaaagccattgtatgaattgatacaactgcaattgcaaaaactaagcgtaatacatcaaccattccataatgaatatcattttttgtttccatatcacaacactctccctgaacataattaatattttagagcagacacttataagtttaaatacctactcattaaaatcattattcataaacttagttaggaactacatttaaatcatcaattagtatataaatataatagtgcaagtaataagccttagttacataaaacctctgaattatacacttttaaagttcaaacgtcacttaagctaaattagagaaaagtatatatcctaataccgtgacaacaaaaaattatattaatataaaaaatacaccaagttaaatccaagaaatctgaattcaacgtggtgtattttctttatatagtaattgttataagattttatcatttgattttataacaactcaacaaatctccaataattaaaagtagctaataatttgttgaaactttatgtgtctatcttactaaatttattactgttgctttaggtctagacatagattcaattgaatatcttattccttgagttcctattccagaagctttaactcctaggaatgggaaatggtctggacctctctctgttttattatttacttgtactgtacctacctctaatctgtcagctacataaaatgcatcatcaatattttctgtaaatactgcactttgaagtccgtattctgatttattcgctatctcaatagcttcatctttatcttttactcttattattggaagaactggtccaaaaggctcttcccatgcaagcctcatatcagtagtaacattatcaaaaagtgttggatatattaaattaccttctctatttccaccaacaattagatctgcccctttatctttagcatcatctattaattccataacataatcagccgctttagtactaattaatggtacaatatctacatctttgtctaatggatttccgaccacaagtttattcattttctctttaactttagaaattaatttatcagcaactttttctaatactaaaattctttttactgcagtacatctttggccagagtatgagtaaccacctgctacaatattattggctgcaagctctaagtctgcatcttctaaaactatagcggcatcttttccacctaactccattaaaagtggtaccatgctagttagttttgaaattctaacaccaacgtctgtacttccagtaaaattaataaagtttacacctttatgagtaactgcgtaatctcctatttcgctgcctctacctgtgattgtatttaataccccatttggtactcctgcttcctgaaaaacttttgctaagtataaaccacataggctaccttgagtagcaggctttaatactaatgagtttcctacaattattgcaggcgctatctttgatgctgataggtttattgggtaattaaatggagatattgcaagaactactcctaatggctctctatttacaactgagattttatttcttttaaatccagggaaagtatcgcctggtatactttcaccagacatattcttagctgtatcagcagtaaatcttataaaatctgctgttctatgaatttcagactttgagctctttctgtctttaccaatttctctaaccataatatcaacaatttcatcagttctttcaactaaaatatcagcagctttatataaaatttcggctctttcactcattggaactttactccattttttttggccctcttttgcaatacttattacattatcaacatcttcctttgtcatagcaggaactgtgccaattaatgaattatcaagtggcgaatagatttcaattactttgttatctttactaccaacccattcaccatttattaaatttttaaagttattattttcgcattttatacaattaaacattccttcaccttgtataatgaacatgtagtaaaaattcattatacttttcctttcttaataatttttactatacttaacataagacgctgtggattagttttttcacctatagctagactatttcaattgaggatataaccacagctttatgcttatttgttaattagttagataacgcatgacgttttatatagagcaaggatacatttagcatgaagctacgtggagcatagcggactaaattaaaaaaggagttgttcttatgatttatatttgcattgatgtagctaaagctaaacacgattgctgcattattgattcagatggtgttattattaatgattctttacgtatatccaattcacgtgaaggttttgaattactttattcttcaatactttccgtcctacctaacaaggatatttctaacgtaaaaataggacttgaatcaacaggtcattatagcactaatctccaaaactatttgtatgctaaaggctttcacctatccattctcaatcctttagctacaaatcttttccgtaaggctcaaacccttaggaaaactaaaaccgataaaacggatgcactagttattgctaaaatgcttttctctgatgatacaaaatcctattcacctgtatcatatcaaattcaagagctaaagtcactaactagacatagatatcgcttaattggttatagatctaggcttaaactatcaattactagacttatagatataatttttcccgaattaccaaagtatgtttggtctattcatcaagtctctgtttatgctctcctatcggagttaccgagcccgaaggaaatatccaattgtcatttaactaaattgacaaaccttctggttaaatccactaaaggcaaatatagtagagcaaaagctattgaaataaaggaagtagctagcaattctatcggaactagcacacgttctttatcttttgaacttcagcaaattattaggttaattcgatctgttcaagctgaaattgatgctttagataagcaaataaaggatgttgttatagaaatagactctcctttaatgagtattcctggaatctcttatacactagcctcaataattctagctgaaattggagatatagatagattcactgatccagcaaagcttttagctttttcaggacttgatccatcaacatatcaatccggaaaatataatgctacacatacacctatggttaaacgtggttctacctacttacgttgggctatattaacagcatctagaactgtttctatgcgtgattccacttttggggattatcttgcaaagaagcaaagtgaaggcaagcattactatattgctatgagccatgtagcaaaaaaactaatacgtgttattttttatcttttaaaaaccaatacttcatttgtttcacaaatttaatttcttaattttccaagcaatgtgattgctttatttgtcatgcacttttttattgactaaaaaatataatttttttattaacttatattgacttcatatagttagtctctttaatacaatttactaattaatattaattatcatttaataatataatatactaattcttatattatatccagataaattaataaaatttaataattaatatatttttattcttggaaatacggcttattgttataaagtatggaatataaaaaattacttcttatgaattttatgaaaaatttaagattaaaattcatattaattaaaactttaagaatatccaatacctcttcgtataaagcttataaaaattagttattttaacctgttatctttagtgaaaaatgttctatatccaagagtaacaaacaaaacagtggatacagcagtactacctaatatagcaagcattataccaatttgatattttattgcagtgataggaaatgttccagaaagaatctgtcctgtcatcattcctggtagagatacaattcccatagttagcatattattcatagttggaagtatggcgctgtcgaaagcattattaacaatttgtctagtggcatcaagtgggcttgccccaagcattaatgaattttctatttcaattcttttatcttcaaaatcactacatagtttatttgcacctagtgcaatacctgtcatgctgttaccaacaatcatacctgaaataggaataaaatattgaggattgaaccatgggcgaacactaagaacaactattataaagaaagctgcagtcaaaagagctccaaaggtcattgaaagagcaattatactttttaattcctttgacatttgaactttaactctttttattgaattataaattgcaaaagaaatcataattataatcataaaagaagttaaccaccaacttggattattaaatacgaacatgagaacataacccattatagtaagttgtattgtcattctagttgaagcaatcaatatttgtttttctcttttgatgcctcgtgatttaaaaataataagcattattagtacaaaaacataagcaattgaaagttggaagactgatagattcattactgcattattcataataagatttcacaacctctccattttcaatcctaactattgaattattatatttctgcgctatttgctctgaatgagtgatcattataagttccttattgttttctaacacaaactttgaaaaattatctattataaattgctcagtatctttgtctagtgcagctgaaggctcgtctaacaaatatgtatcagcatccattaacattactctagctaggcatagtcgctgtttctctcctccagaaaggttaccacatccatcagtaagttttttattaagttccactctttcaagaatttctttcattctactcttggatgcaggaagtttttttgaaaattccaatccaatttggagattgtcttctatattaccactgtaaataacaggagtttgaccaagcataactacatttctacgtaataatattgtatcaattttagaaatatctttattattataaagtataactccttcatcgggtacatttaaacggtttaacatacgaagtaaagttgtctttccactaccagaaggccctacaacacatgtaattggtttatctatattcagaaatttgatatctaatatatttctaaattttatatttctaatttcaaacatattaattcacttcctcattatatagcgtttgtaatcatttctgcacatagcattcaaattgattaatgacataaactttattatatatataaaattcgtaggcgattgtggttaagttacgtattgtgcatataagaacattttatgtaggcgaataagatttctaaatagtaaaaaaaccttgtaacaattataccaataattacaaggtttttcactaaatctattaatttttaataagcccaatagctacacctaaaacgttaaattgttgatcttctataataattggctgatatttgtcgttctcaggtataagagcgattttaccatcaataactttatacgtcttaagcgttgcttcaccttcaatatcaacagcaacaatatccttaatacgtggcatattctgcttacttattactacataatctccatcataaatgtttttatttatcatggaatcacctttaactttaagcataaaaacatcttttgaagttcttatccaatcctttggtaatgaatagctatcctcaatatattcattaattaaaattggattacccgctgcaatctcattaaatactggaatatttactacgtcgtctactttttcttcaaaattgttataatctacatatatttcatctactgatcctgaatcttttataaatctatgagatatatttctctttaaatctatgtattctatagaacctaatgtaagagatgaactttgtaataaattcttagtagtctcatttttttgaatcaacttatcactgctatctacaaattcttcgatctcttcaacttctatttctttgtaagattcattcaaagaaatacattttcccttcatatcatatcctaaactagaaaagcggcgtcccttcacaagccaagcattaggaatagcagtttcaaaagtatccataataaatgttatactagaataagatttttcattatatattgatttaactaattctaattgaactttcgtaagttgctgactattatctataaatatgtgggtataattaattcttggagttttttttgcttcatttaaagccaaaagttccatgtcttgggcatctactttattaagctttcttaagttattagtatattcttctaaaacttcaaagatagcttgtctttgtttagagtttcttctaagaattttagatatctcagtgttcaaattattaattctaccaactctattagcgctttgatactcttcaagttttaaataattacatgatttaatccatttaatctcgtcttttataaattcaatatgatctaaatttaatatattcgtttttttcttttcgtatcttcttgacactatacttattgcatttttaagctcagcttcacgttcttcaaaagatgccaaagttagatttttattattactttttatatatttatttaaataataagagactaaagaatctattgtctttatttctaatttatcactattatcttcatcaaagaagctattttgatgatatttttcaccttcaatatttctatagacagaataaaaataatcagaatattcttcgttacaagctgcgacaagtattttgtcatcattagatatacagtaattattaagtagcgatggaatcttatgtataaatgcagtggtcttccctgacccttttggaccttttattaatagatgaccattcggcttattattaattatctttttttgttttttgccaaattccatatttctcccctccttttttcattgaatttcactttataaatcgaacataaattcttaattattttgtaattatactatacttaatagctgtatgtaaagtttagagaaataacgtaaatttgtttgtcaattatcgaaaaatctttaattaactggtcaaacattgtattaatcttataaaatagttataataaacaaagtaaaataaggcaatttaaatatggatatacaaacgaaaaaggaaggtgacataatggaatccaatattatattttttgatattgatggaacattatttaatgaaaagacttatacggtccctaatagtgcaaaggaagctctaaaaaaagcacaagaaaatggacatctaatctttattaacacagggagaacaattataggaattgatgattgtgttaaagaattaaattttgatggttatgtttgtggatgtggaacttacatagaatttaaaaataaagaaatactacatagaaatcttggaatagatttatcaaaagaaattgtagccaagcttcgcaaatgtaatatcgatgctatattagaaggtaagaatgatatttattacgataccaatatacattctaaagaagttcttagaatcaaagaacgtcatataagggaaggattttataaaggtaaaacttttgatgatgctgaaattaactttgataaatttgtaatttggactaatgaaaatagtgattttgaaagctttcataatgaatttaaaagtttatttgaatttatacatcgtggtgaaggcttttatgaattagttcctttaggattctctaaagcatcaggtatagaatacttaataaattatttagatattcaccacgaaaacacatatgctattggtgatagtaccaatgatttatctatgcttaaatatgtgaaaaacagtattgctatgggaaatagtactccattattatttgacttagtatcatttgtcacaaaggatattgaggatgatggaattaaatatgctttaaaacactacaatattatatagaaaattatttatttttagttgctcctaaaagaaatgtataaaatagcctgtcgctaaatatacatagtagaagaaatcttttaggaggaattttatgtcctttataagaaaatttgagaccttaatgagaaaatccaataaggacattgctaacataaatttggataaaggtattgaaatatataactattctcctgaatttaatttaatatcatcaaaaaaaatattagaaggaagttatacttttgcagacctttgtttcgatataaatgaagacgataccctatatggtttagtaagtttacaaaagagtgatcttatgtatttatatataaataataaaattattctaaaaaatatgctgctaaattataattccaacatctttacaattaagttcccttatataaaaaaaatagatggcaatgttcatattttttattatttggttaataactcaggagcttattgcacattaattcattattgcaatataaatggaaaatggataaaaaatgaaatagatacttctaattatacaatattaagcaattttaatgtgatatttaaagattctattcctataatattttattttaaaatagttaataactatgaagaactttttgtatctatttttgattcaagtacaaatagttggtctaaaccttgtcaagtaacaaattctaataaatctaaagtatatttatctgttattatggattctaagaataattgccatatcgcattttctgagaataattcgcgtagatattattgcacctacataaaaggatatataaatgacaatcaatttattgcttataactatcaaactataagcaagactattgcatgtacgtttcctaatctaatacaatgcaaaaatatgctttatcttcaatggatagaatactcaaatttatatacgagcatttcgtatgatatggggaaaacgtggttgaatccttttacagataatttagcatataacaatccttttaaatgctataattataaatcaaattatcataatgatataatagataactcatcagctatctttgcctataataactctctagagatactaggactcaagaaataaatttatattggtatataagcaaaaagcacctaataatataaaatttcatagtataatatgaaacctttaaaatttaaggagtagtaaaagtggaaaattcaattaaagctatttgtaatactgcaacatacttggataaatatcattcgaatacaaacttttcaaataacgagtcattactcgttggttccataaacaataggtcattaggcaataatcactatatttctttattaaattttcaactatctgaattgtcccctgactctataaagaaagcatatttatatttgtttattgaagatattaaaccagattataagaattcctttggctttggtattttaggtaattatagcaatgtagatatagctgctattgattggtcaagattgcccaaaaaggattatacaaagttattaaatcatataatacatggatataatgtgggatattatttaaaaattaatgttacttcattgattagatctctagcaacacataatgaaagctataatatatttttacttcctcaaaatcaggattctaattcaattattaagttatcttcattcgagtcaaaatatcctccatatttagatataataacatataatatagattcgacaaataatattgatttatcggaagaacttaatattgaaacttatattgaagaacctgttgaagagaatatttacgatgatgaggagactgagactaataattctgaagacatttctacctcaaaggaatcttcaaatgttgaaagagatagtgtaaagaatcaagaagaggttacgttaattaatcatctgctcaataaagttatggagatattagtaaatcaagatttaaaattgaactctttcaattcttccaatgaatctttaagtgaagagataagcagcttatcaaataaactggcaaatattgatgataagatatcttcattagatgaaaattctactaatttaaaacaaaacgatattgaaacattaaatataaatatgtcatcattaaatgagatcttagtaaatcaagatttgaaactaaattctctgaactcttacagtgaatctttaggccaagaaataaacagcctatcaaacaaagtcgcaaatatcgatgataaaatatctttattagatgaaaattctactaatttaagacaaaatgatattgaaacattaaatataaatatatcatcattagatgaggtcttagtaaatcaagatttgaaattgaactctttgaattcttacaatgagtctttaagtgaagagataagcagtttatcgagcaaattagcgaatattgatgataagatatctttattagatgaaaaatttgttagtttaaaacaaaatgacattgaaacgttgaatataaatatgtcatcattaagtaatgagatattagaattaaaagctctattacctaatttaagtgtaaatcttgagagtctaagagaagcaattaatgactttactaagacagagaaacttgacttttctaatttgaactctgtcagctctcagttattagaattatcgtcagatttgaattcactaacaaaattgattggttccatatcagttgaacccataaactaaactacaataaaaattaattcaaaatatctttataaataaagttcttgttcatgtaatagtgtaattatttgagcaagaactttaataatatgctctattattattgaaatttagcatatatttttatcaaatactactttcattttacctagaatcaaaattccaacgcgcatcaatacatattcttcacaatttacatcataaaaacttatatattttttttctttgcaatacttgtaattaatattttttatacatgctttatcatataaaataacctttggatcagggctatctttacatatgtctctgtcaccacaatttattaaaatttttgttgtagcaattgagtataccctaataaagtctttaataaatgattgattatttggcattgggtatttgtctatatagcatctcgtcttatataaatgattatatctattatagatttttatgcagaatgaaactttatattttattatcacttcaatatatctgttatcacatctatttataatcttaatactatcaattttggaacttttaatgctaaccgaatttttcttcaaaactatttttcttacatcagagggagcgtaaattttgctattgggaacgattattcttccgtcaggtgtaccatcaatgaagcgaaattcatatggctcatcagaatatatgctgcaattcttatcatagcagcatatattcttaaaactattatttttacggccttttttatatttcaacagatcaccccataaattcacttattattggtttaataatatctttatttattggatcacttaaataatatgtccattcatttgtaaaccactcctcagaggaagttagagtattttttgagtggacgtgccacgcataattcaagccatccaaatattctttattaggcatactccaagcggttcccatttggatatctagcttgtctgtaattacacttggtacagttccatttatataatcttcagttttataaattagggtataacatgatgtcacttttgcactacatataaataacttatcattaaacgaatcatatagatacccccattgattcaatagtgcagttgtttcaggtttaggaatataatcatataacttctgaacatatgatttgtgatacatatcatctgaatcaattcttacaaaatatacatattcacttcctatgattttttcttttataaatatgtctgccatattcttgctgataaaaacaatattttggggcattggcccatatttacttatttcggaaaatataagttcttcactttctttactatataaaacacaagctgtgaagtcttgatttgtttgatttataaggcttctataggtgtaattcataaatatattaattctattttttatccaaatctcgtcttctctttctttatctacagtgtcaaaatatccgcgtatatcatttttttcttcatactcaacttcttcatagctcgcaatatttaatggtattagaattacaatactcttattcttcattaaagttcatctcctattttcgtttcctaccttacatttgattttgtttattgcattttttccacttaataaactctgatcactccacaaataatcccattgaccaaatctaccagcacaataaatttgatttttctcataaaaatctattatataatccctattttttattgtatctctataaaagatcacatttgtatgatctaaacttctaatatcggaaagtattacgctatttcttgaagcaattttagctttctcaatgaaatcatagatattgttaattattttttcatttgaacatttcaaaggtttggctttgcaactgtatatttcaaattgaattgtactatatccgggcttaatattattcaatgatttttttcctggcagatatgctcgtgctggaagtatatcttcatcataaatataaaaccaaatatcatcaaaatttaattctccttcaataactaatgaaactaaaattgccgaagttgatcgtaaattttgagctctactttttagttcttcactaatgtctttcgtaatagaagttagttcagtaagaggtatagtgctaactagaaattcatagttaactttatctccattactaaattcaactgttttatttttcaaatctaaagaaatagcctctgcattaaatacaatattacagttattaaccattggttttaaaaactctttataccctccgctaatgggatatctcatttcttttgcataatacgtatttggtgtatcttcagtaagtgcaccataaataacctcttcaagacttggagtatataccctatttttaatccatgatatatccatgttttcagcattctcacaccaatactttttagtatattttaagaaaaaattctctgttatatattctccatatttgctatatagccagtttttataatttatattttcagtattcaccttatttttatcacaaaaactaactattgctttaaccttttcttcaataggaaggctaaagagattattttgtatcggatgtttaaaccacctataattactaatatttttagggtgtggttcaaaagatctatgcggaactttatcaaaaatatgtctaacttcgctatcttgagtaaaagataaatgaatacccttatcaaaaataaaatcatcaagctggaagttaccgcatatgcctccataggaattatctttttcataaataatagtttgatcactttcatcatagtaacttgctgcaattcctgttataccagctcctaatattactatacttttatccattttaaatctttaatcctgtggctatattcttaaagaagtcttctatagtactaatcatatagtccatcatttcagtggtaattccaggataaacaccaataaaaaatgttgatgaaaggacttgagttgaattgcttaattctcctatgattttatgattaatgtttttatatgctggttgatttaatatatttcctgcaaaaagcattcttgtttcaatacctcttgattctagaaaccgaacaaaatctcgtcttgtaaagccaacattatctcgcactgttattggaaatgaaaaccaagctggatcagcttttttgtatgatttaggaagaataactttatcttcatatttttttaagcaattatatagtttcttgaaattttcttttcgcttttgaataaaaactggtaatttttctaactgttttattcccattgcacattgaatatctagtggttttaaattatatccaatattagtataaatatatttatgatcataaccttcaggcatgtttccaaatttgaaatcaaatctatgattgcaggccccattcggatttttttcatcttgttgacaataacatgcccttccccagtctctaattgaaagggctattctactaagctctggattatttgtgcatattgctccaccttcacccatagtaatatggtgagcagcatagaagctataagttgaaaaatctccaaaagtgccacaaaatctaccatcataggttgatcctaatgcatcacaagtatcttctataatatataatttattcttttctgcaatttccattattgcatccatatcagcaggatttcctaatgtatgagcgaatataattgctcttgtcttatcagttattgcttgctcaattaattttggatctatattatacgttccctgttccacatcaacaaagacaggtttaagattgttttgtattatgggatttaatgttgttggaaatgtaactgcagtagtaattacttcatcccagttatttaatggattaatgagttgtctagagcataaacttgatacagcaattaaatttgcagacgaaccagaattagttactaagcaattttttattcctagaaagtttttaaatgcatcggtgaattctatactctttctacctaatgttagccaaaaatcaagagcagaatctacaactgccatcatttcattttcatcaaatactcttcctgaataatgaattttagtttttccttcaataaatttttcagattcttttcttaccttatatatatctttaactttatctagaatttctttacgtattgaattttcatcctgtataaaaatttcgctcattattttatctatccctcacattccaatcatatttaatgaaagatttccatggatccattcttaacatctcatcatccttgtgatttactgttattaaatctgctactatagcatactcattgccaacagttttaaatccattccatactccagctggaatctgaactaaacagtaattttctgttcccatatatatttccataagttcattggtagtatttgaattttctctagaatcgtacaatacaagttttatcattcctttaattactgcatagttaagaatcgcttttttatgcagatgccagcctttaacaacgtttgggtatattgtagaaaaatatatttcaccaaaccctttaaattcctcatcagtactctcttgcatttttaaaatagttcctctatcgtcaggtatcttatttaatttttttataactactccatctatcaaattgtgacgctcctaaaacaaactttattataatatatgtaatatatgccttatatgttaaactatatacagctttctacatataatgctataaaatgatttgattaggagatgcatcaaatgaataaagtgagatgtctagttgtttctgatttcaccgctattggcggtattattataaaggcaggaactatatgtgaagtgttaaatgatggtgaagaatttatatggataaatccttatataaaagaagcagatgaagaaattcctattccaattttaaaatctcatgttagatttctataacaattaataaggtggtaatttaccaccttggaagtttttttatggattactcacctatatattcaggtattattttatttacaacttctatatcatcagtagcatcatccacctgagtaaaccaattattaaagcttgtaattgtatttttaccatgaacatgccataaataatttctcttttctataaattcatgtggaactctaatagctatatactgttcattatcaatatctgtaaaatcttggttgtatattttaccatttaaatagtcttgtgttttataaataaaggtataaaatgttacaaccttgcaataacatttacctattgatttatttaccgaatcataaatatatccacttctattaattaaagaaacagtttcaggttttggattatagtcatataattgttgtataaatgttttatggtaagcatcatctgaatctagcctcacaaaataaacatattcatagtcttttaaatattcttttatttcctcgcgatacttagatttcattacaaaatgaacattacttggaagagtctcatacttatttaatgctgactttatcaactcatcagtagcgtcttcataacaaaggaagaagttaaaatcttgattggtttgtaattttaaacttctgagtgtgaattcctgaaatactttgattctataatttatccattctttagtatagcgatctcgtccattttgtatatagggtttaacattaaacatacttgttattattacagttctatttttcattttacacttcactctctataaattgttcaaatgtttcctttatctcatcctcaatattgcaattaggtttatatccaattgattttattttagatatatcgaatatatagtcatctttttcaattatttgatcaaggttttttgcatgaattattttgatttgttttccttttaaaagtttttcgccaacactttttacaatttctgcaactttatttatagaataatttgaatcgccgcctatattaaaaacatcatatttttgtttttgctcttctaatataatatcaattgcactgcacaaatctttaacagataagaagtttcttttttggtttcctgatgaatttattatgattttattagttttaaaggcctgtactatgaagttatttggcacaatactccatctttcaatttcactgaaaagtggtctagtacaaaggtttgcgagtcttatagaagttcctaagatattagagttatttgaataacgttttgtgagaagttctccaaagtaatgagttattccatataaagtcgatgcttcaatgctgtttttttcatttattgttccgacaatgttggaacttccatatacatgaaatgttgaaacatagataaatcttcctattcctaatttggtacatatatcaagcatattttcagtaccatacgtgtttattaaaatggactccttaggtgaatttttacacttaacctcattggctgctgcgcagtgtataacgcaatcatacttatttcctatcagttttaagaatagtttttcatcagttatatccgcaattaccacattaaatttcttagtccattcctccatatattttggaatttttcttccaataagtgttacttcatttccttttaaagagagatattctgcacaataacttcctaaatatccaaatccacctgtaattaaaatattcatattattaccctacctctactcaaaacttttgtcttctatggtctctatttgtttcatgcatagctcataaacatcactatttttatagcctttataccattcaacagtcattttaagtgcttcgtctataccaagtataggattccacttgatatatctcttagctttagtgcaatcaatacttaataactctgcttcatggggaccattattttgagaaattataaaatcaccctcgccccaaagctttattgttctagaaacaatatctttaactgttaaaatatcatttgaatttggtccaaagttccaagctccaataaattcagactcatgtgaaatcaaatgagtacctaacatcagatatcctcttagtggttctaaaacatgttgccaaggccttattgcaattggatttcttattactatgggaactttattttgcaatgatcttattatatccggaataattctatccttgctccaatctcctcctccaattacatttccagcccttacagttgcaataaattttccatgatttttgcattcattaggattgaaaaagcaatttatatatgatccagtaacaagctcagcacaagctttactacaactatatggatcatatcccccaagtctatcagtttctttatatccccatatctgatttatattttcatagcatttatctgaggttatgataatcccagcttgaacacttttgctttttcgtatacattcaagtatatttatagttccctttatattaatatcaaaagtttccactggcatttcataagataatctcactaatggttgtgcagcaagatgaaatacaacttcaggctcatacttatcaaatatcttttccatttcgtctagatttcgaatatcattacgtaggtcaactatcttattgtttaatttagctaatacaaaattatcatattttgtatatgggtctttagatactccaattacactagctccagcttttagtaaccacatacatagccacgaacccttaaatccagtatgtcctgttacaagtacttttttacctttgtatttatcaagatttaatcttttgtcttctactcccatatcttccacttaccttctcccgcattatatagattatttatatcttctacatctttggctgtgtctacagctttccaaaaaccgtaatgattaaacaccgatacttgtctatctttaacgagacttcttaaaggttcttgctcaaacatgcagtcttcattaggaatgtagtctagagcctttttattaataaccatatatccaccgttaattattgtatctttgattggtttttcttcaaaattttctactattccattattagtttttaattcgccgaaagttgatacaggattaattcctgttaaagttacatacgtacctttatttttatgatactcaagtaaatcgtttatattaacatcgcttaatccgtcgccatatgtcataaaaaattcttcaccttcaatataatcactaaccctctttagtcttgttgctgttttcgcttctaatccggtatcaacaagggttatagaccatttttctttttctccatccaaatattttattttataatcatcatcacacattgttattgtgaaatttctattaagaataagcatattagcaaaatactgtttaattaattctcctttatatccaagacataaaataaaatgatcataaccgtaatggtaataagtcttcattatatgccatataataggcctatcgcctactgttacaagaggcttaggaattctttcactgtactctctcatcctcattccttttccgccacataatattacaacatccatatctttagcacctcattttctactcgtagtattttataatatgatttcactacttcttatgttactttataaacacgaatttactctattgcataacatactattaaaaaaataaaaaagcatcataataatgcttttttagattaaatattaaatataaatttaggcaattcttaaaaagaaattggattatactacttatacatgtttttataatatttttggtaatcaccagatgttacatttttcatccattctttgttatctaaataccatttaattgtttgttttattccgatttcaaaagctgtttctgggtaccaacccaattccttttttattttgtctggtgctatgccataccttctatcatgcccttttctatcctcaacatattttatcaagctttcacttacatttttgtctacattttcgttaatgtaagaaataactgtttttacaatctgtatattagttctttcattatgaccaccaatattatatatttctcctattctgccattattaattaccatatcaatagcttttacatgatcttctacaaaaagccagtctcttatattcattccatctccatagacaggaagtctcttatgatttaagcaattatttattaataaaggaattaacttttctggaaattgaaaaggtccataattatttgagcaccttgttatatttataggcattttgtacgtatcataataagctttaactatcaaatctgcccctgctttacttgaagaatatggactatgaggatctaaaggggtagtctctttaaaaaagcctttagatcctaatgatccataaacttcatctgttgatacttgaagaaatttaacgccttcttcaaatccttgttcattttcccaagcattttttgcgcaatttaggatattaacagtaccaagtatatttgttttcgcaaatacttcaggttcttttatacttctatcaacatgggattctgctgcaaaatggacaacataatttatatgatatttcttaaaaagtattgcaactaattctttatcacaaatatctccttgaacaaattcatatcttttatcattctctattgatttaagattttctaaattccctgcataagttaacttatctaaatttattatattaatatctttgtatttatttagcatatataaaataaaatttgaccctataaatccagctccacctgtaactaaataagttttcatgactacaactccttcatttcacttgactaatttacttataaacgcttctattgcatctttccaatttctcatttcatcgccaacagtatttcttaacatcatattatcgagagacgagtatttaggcctttttgcctgagtcttatactcttcagaagtacaaggtattacttcacattcttctccagataatttaacaattcttttagcaaattcataccatgtacactcgccattattggtacagtgatatattccgtaaccatctgtttctattagcttcaagatatgatatgctaaatcattagcataagtaggatttcctacttgatcattcacaacattaaaatggtttttttctttagaaagtttcattattgtataaacaaaattacttcctacataaccataaagccacgctgttcttacaataaaatgctttgaacataatagctgtacatactgctctccgagaaatttagttttaccatatacgctagatggtgaaggtaaatcatattctctcaatgacttatgagtattttcattaaatacataatcagtagacacttgtactagtttagtgcctattgagtcacaagctatagcaagatttcttggtcctattgagttaactctaaacgcaaaatcttcatcgatttcgcatctatcaacattggtggctgcagcgcagtttattactacttctggctttaaataacttagtacatctctaactttgactaaattcgttatatccagctcatctacgtcaaagccaataacctcagctagctttatactttcggatatttcccctatatcagctcttccggtttttattatttccgtaatctctctgcctaattgtccttttgctccagttattaatattttcattgtcaaatacgcacctcttttaactagatattataatctggatattcccttaaatctatctcgtttatacctacattaagtttgtctttttctgataaaattacattattaactttgtctaaaggccatgcaatatttatatcaggatcattccatttgataccttcttcgtactcgggtgcataaaaatctgtacacttataattaaatatagcttcatcagaaagtactaaaaatccatgtgcaaaaccttctggaatataaaataactttttattttcttcacttaaaatgattccttcccatttgccgtatgtttttgaaccatttcttaaatcaacagctacatcaaaaacttcacccttacttactctaataagttttccctgactatgccttttctgaaaatgaagtcctcttaaaactcctttagtggatcttgattcattatcttggacaaaattcatattaagtcctatttcttcaaaatgttttctattataagtttccataaaatagcctctattgtctccaaaaatctttggttctattacataaactccacttatcttggtttcaataaatttgaaatttcccatacttcacctcttatttactaacatttagtattcgattcaatacttttaactacatcgattagatattttccgtatccagtcttttttagagtctcagcaatttctagtaccttttctgctgttatccaacccttacaataggctatttcctcgaggcacgctatatatatgccttgagtattttgaattgtttcaacaaaattagatgcttgaagcatcgctgaatgtgtacctgtatcaagccaagccatacctctacctaacaattgaacttttaatgaatcctcttctaaataagctttatttaaatctgttatttctaattctcctcttgccgatggttttaacttttttgctttttcaactactgtattatcataaaaatatagacctggaacaacatattttgattttggattttcaggtttttcttctaatgagataacctttccattactatcaaactcaacaactccaaaagcttttggattttgaatgtaatatccaaacacatatgctccgttttctaagcttgcagctttttttaaaatatctgaaaagccttggccataaaaaatattatcaccaagcaccattgctacattatcatctttaataaatttttctccaataataaatgcttccgcaagtccattaggattcttttgaactgcatactgaatatttaatcctagatcttttccatccttaaataattctttaaaactaactatatccctaggtgttgagataattaaaatatctcttattcctgaaagcattaaaactgacattggataataaatcattggtttgtcatatattggtatcatttgctttgacattgcttttgttactggatacaggcgtgttccactaccacctgctaaaataattcctctcattttaatcccccataatatcttagtcattacattaactaagataattttgtttattaattatgttatgaaaaacttaagcatatagttactttctaatttcataaaattagaaaacagcattcccttatcttttagaaaatgctgtttaacaagttgcttttactattctttcataaataatatttttaaacatgaatttttaaataatatagctatattaccatttgtttaaaatatctattacataatttatttcttcattagtcatcccataccatattggtatgcttagtactgtcttagagatacattctgccaatggaaagtctccttctttatatcctaactccctgtacgctttctgaaggtgtataggtattggataatgaattacagtactaatcccatgagaatttaaataagctactaattcatctctaaattctgttcgcagtgcaaatacatgccatatagaatcagttactaaatctatattaggaagaattaatttattgttagtaattttctctaaatatactttggccaccttttgtctataagaattccatttatcaagagattttagttttatacttaaatatcctgcttgaatttcatctagtcttgaattaacacctttgtattcattataatattttattttagagccgtagtttctaatagctcgaactttttctgctaactccttatcattagttagaatcgctccgccatcacctagtgctcctaaattttttcctggataaaaactaaatcctgcagcatccccaagattcccagctttttgtccgttatatattgcaccgtgagcttgagctgaatcctctattagttttaaattatattttttacataatggttttattttatcaatttctgctggtctaccatataaatgaacagcaattattgctttagtttttttagtaatagctgcttcaattttagttacatctatattaaaagtattgatatcaggttctacaagaataactttagccccaacatatgaaactgctaatgcagtagcaatataagtatttgctggaactattacttcatcaccttcaccaatatcatatcctctcaaaataattgaaagtgcatctaagccatttccacagcttatgcaataattagcaccacaatatttagaaaactctttttcaaaggcttccacatatggtcctaaaataaaccagttattgtcatatattttctcaaaaacatctaaaatctcatcttttatttcattgtgcattggtttaaaatttaaaaatggtacttccataaaaccccttcttaatatctattaaaagcttctttcatataaaaatctatatttcgtatatagtcgtcttcattataataatctgatgctagaactaaaagaactgcaccttcactaaaatcatacatttctctccaaatatatggacctatatatagcccaactgccgagttatctaatgtgaattcagcttcttcttttggagatttaacttttatttttacagaaccattaaggcatattaatacttgatgaagtttcctatgcgcgtgaaaacctcttgatatatcttgaggaacttttgtaatataatatattcgttttatatcaaacgggatatcaacaagtccctcaatcggtgttaagttcccatatttactacctatattaagaaatttaaatagagaacaattatacatttcatcaccttgtataatgaacatgtagtaaaaattcattatacttttcctttcttaataatttttactatacttaacataagacgctgtggattagttttttcacctatagctagactatttcaattgaggatataaccacagctttatgcttatttgttaattagttagataacgcatgacgttttatatagagcaaggatacatttagcatgaagctacgtggagcatagcggactaaattaaaaaaggagttgttcttatgatttatattggcattgatgtagctaaagctaaacacgattgctgcattattgattcagatggtgttattattaatgattctttacgtatatccaattcacgtgaaggttttgaattactttattcttcaatactttccgtcctacctaacaaggatatttctaacgtaaaaataggacttgaatcaacaggtcattatagcactaatctccaaaactatttgtatgctaaaggctttcacctatccattctcaatcctttagctacaaatcttttccgtaaggctcaaacccttaggaaaactaaaaccgataaaacggatgcactagttattgctaaaatgcttttctctgatgatacaaaatcctattcacctgtatcatatcaaattcaagagctaaagtcactaactagacatagatatcgcttaattggttatagatctaggcttaaactatcaattactagacttatagatataatttttcccgaattaccaaagtatgtttggtctattcatcaagtctctgtttatgctctcctatcggagttaccgagcccgaaggaaatatccaattgtcatttaactaaattgacaaaccttctggctaaatccactaaaggcaaatatagtagagcaaaagctattgaaataaaggaagtagctagcaattctatcggaactagcacacgttctttatcttttgaacttcagcaaattattaggttaattcgatctgttcaagctgaaattgatgctttagataagcaaataaaggatgttgttatagaaatagactctcctttaatgagtattcctggaatctcttatacactagcctcaataattctagctgaaattggagatatagatagattcactgatccagcaaagcttttagctttttcaggacttgatccatcaacatatcaatccggaaaatataatgctacacatacacctatggttaaacgtggttctacctacttacgttgggctatattaacagcatctagaactgtttctatgcgtgattccacttttggggattatcttgcaaagaagcaaagtgaaggcaagcattactatattgctatgagccatgtagcaaaaaaactaatacgtgttattttttatcttttaaaaaccaatacttcatttgtttcacaaatttaattccttaattttccaagcaatgtgattgctttatttgtcatgcacttttttattgactaaaaaatataatttttttattaacttatattgacttcatatagttagtctcagagttgttattttaattctttataataggtacgattaatagcacctacagtcccaaacccctctttaaattgagccaaagaagcattgagaaattttcctttatcttcagtacttattccaaaagaaaaaaatttgaatttgtttagataagcttgactaattagattataatttagaaaattcataggataataactagaataaagagaatcagaagcaagatattgagtatggaaaacattattactaaagttaaataccatgctgcctgctattaaattgtttttataatatactccataaaatttaacaatatctttaaaccttgtatttttaaaatctagcaattcttctagtgaatgtacaggttttgtattatgcttttcaagtgattttaataataaactataaaaatcatctacttcatcatcagtttctagtgttctaaattctaaattgtatttcaaactgtacttcaaatctcttcttttagatgcagaaaagttattttctataacaggcgaatagttatcaaaatcaatatataaacttaactcagtataattttcataattatatttaaaataaaagtaatctaataaattcgtatttccgctgcaaaatatttcggaggtacttttaagaactatttcatcaaaactattttggattaaataattatctaaagctttaaaaagattatcaatatgattgatgttattaaagtttttattaattacaactcctccaaaagtacttcctttatgagaataaaatacttttttttgatcttcaactatttcacatgcagggattaatgcaattatactcgtcccctttttaattattaaagaatgatctttaaatctatctttatgatagtttaaaaaatttctgctttgaagaaaagttccattcacactattattctctataaatttatcccattcttgttcattatcattattgaatttttctactgataaattcatgtgagtgactcacttcctaaaattatttaattaattctgcatatccaaatccatcatagccatagttatttccattgtaaaataaatacgtcttatcattatatttaactacagatgggtatgccatcatttgtgaatcccatcctgatgaagacaaagaaatatttaatttatcatcatctcttgtccagtttattccgtctaatgattctgcatatgctaatttataagtcaaatcttcgcttcctgcacagaaaaacattttgtatatatcctcatccttaataacataaggtcttccaaccctatattcatcaccttgtgttcctataattacatctccagaacccacaaagtttataccatcctcggattccatatatctaatatcgtataatggaagtgtctttttctttccctctttaaaataactacctccgccgtaataaactttccatttaccatcctctttaacaactgaatgaattactctaaataaaagttcatcatcacatctttctaggactgggactttactatatcttttaaagctattaccattatcttcacttatagctagcccacaatatatcatcattcttacatggtaacctacttgataccctgcgtagtataagtgtatttttccttcattccttataacagcacaaggaaccacaccattatcatcgaaagttcctggcaaacctatatctaacaaaggttcttttgaaactttttttactattttaggattattagcatctacgtcaacatatccaactctgcttactcctttatcatctctaagcccaacaaaaattctaatagtatcatcatttaataataatggagttggctgtagtgtagaatttttagcccaagtactactaccatctaggctataaataattcctttcttttcccacttcaattttattccccctattcctttatattaaataattctaaagaacttttactatctggttttgcaggactaccctttaaaaataaattatctccatagttctttgttatgagagctccagctgctacaaatgagttttttcctatagatacgttgttaacaaaggtagaattaacaccaagaaaactattttcaccaacttcacaataaccagaaacaactacatgggaacttataaaagaattatcctttatctttgttctgtgaccaatatgatttccgctccaaagcactacattattcccaatctcaacattgtattgaatagtattatcctcaaaaataaaggaattttcacttatttttgcatttctccatacaaaagctttcgaactaatataagaggcaaaactatatcctttacgcttagcttcattataaagacgagttcgaactctattgaagtttgtaaatgttatagctgtgaatacttcatattccttagtggaataggtttgctccatttcttcaaaagctataacaggtaatccgaaaaggcttttttgagtaataaattgcttttctacagcaaaagcttctacagtatatggtgaatcataagtgaaatactcataagcaatttctgcaaattctccatcaccaattataaccaatttcttatttttatccatattattacttcctttatatacttacataatttatattaagcttcttataggaattttaactttttgtaaaattccattatacaaacatactatgcgcgtttaaaataaagtgtacctaactttatttagtaatataaaacatggaaataggccttaaataaaacttattatctaaagcctaatgaaaattaaaatatatattgcaattcacaatgcacaattacggataaaattcttgcaatatttttagaatcatgatgaagaatttttttgcaatatatatagaaattttgtatgaacttttatgtggatttaagaaaattagatttaagttggtatttttaaattatttattgttaaactattcaaataaactactcaaataatatatttatgaatttagtgtagcaccttatatattcatctttaagaataattgtctccttgtccttttcagatttgctattaaattcttcactgaaactagttaaaaaattagagtattctttgaaccattttcttagtattattaataattcatctctagtttttataaatgccttattttcataagatgaaataataatgttaaaaaagtctattgcagcccaaaaagtcaaaattttatcttgagtattttgtgaattatgaattctaagattgcttagaggttcagcgatataaatcatattaccttttcttaataattttagccataaggatatatctcctagagaatatatttcattgttatcataatcaactatactgtgtttagtaagattgctgtctattgcttctcttttaaatattgctgtacttaattcaccaatataattaatcattgaaaatagaatttttcttcctgcttcttcacctgttagacgaatatcataaggatattgccgtacagttctaaagttatcattaaggtattcgtccttatcattgatcatttttctatagctagtaataagtgtaagtgtattgtcataaagaaaataattcatcattctatctaatttatttaacttaaatacatcatcatgcaataaaaaatttatatattctccacatgaagctgaaagacatttaccaagattaacttttcccctctgacctgatggaccaccattatttatatattttattttatttgtttttaatttgtatccttccataaacttctgaacatcattagtagtactatcatcgcatattatgatttctgtattcctatagctctgatttagtgctgaatcaagagcttctttaaggtagtttgtttgattataggctggtatcagtatgctaactaaagggaatatatatttagaataattatctaaatatatattcctatattcttcaaatccattggccgtatttacataaccacaatcatgaatgcaccaaggtattttttgatttggaactacaactttaaatcccttttgaatgaattcagtactttgtgaaagatcataaaaatgccatccattaaaaagatcatctctccattttatatcgtattgagttatcattataagcccatcgatacctttaacgtttgtatatggctcgataaattcattaaaacttagaagttccattgagcctctatgactgtcaaaaacttttcctaccctgcaagggtcttcccaccaaactccagatactggtataacttttgcaccaactacacctattagacctatatcttgatcactactgaaaatgcttaaagcatcttcaacaaaatttgtattttgaatataaacatcttgatgaagatagaccttatacttagaatcacttttttgcatagcttcattatatgctgaagctatgcttttagaatttctcatggctataaattctatttccatatcttcaggaattttgattttattaatataagtcaaacttttcttatatagttcctcattattaacacaagtaataaatgctattttattttttttcattttccttaccaataacctctccttactttgtatttatttaaagttatttatatagtattcattcaaataaaaaccgagtctagttacttaaatttaatctatacaaaaaatctttgagataattttcatctacaataaatccattttgatagtatggtaatcttgagttaccataaagatatccatccaaaaagtaagtttttaatcctaatacgcctgaaatattggaataccatggtgattgaataacttttggctggataaatataacctttgcatttttattagcaaaaataatattggtaagtccagaacctgattcacctgctataacttctgcttctgaaaaagtttttaattgatcctggaaagacattgatcctggaaatattatttcgaatccgaatgacctaaaaatattctcaacagctggttgattttgcaatcttgaattaggtgactggcttctagagacatataactttctatgaacattactactctcaattgctaggtttttatttataggtttaacagctaaatcatcaagtgcaacatcttgatattttaataagaaatctggtttaatattacatggataaactcctaaatctgaaataactatcaatttttttatagaataactatatcccattgctaaaggaattatttttcgtccttgtttatttagcatctgcaattcttcttgaaactgcggcactctaagacaagcatcatctattattattggcatatcgttatattcattagtatcattaataagacaaagtttagctaatacttcaaattgaaaatgagagtaattataagatgaacctgatattagcattattccttcttcaacggtttctccagtctcgttatagcaaacaacagtattatttttattcacagcaattgtttgatgacaccttaaatcaaacttattttcactatccataaatggtaagtcataaatgcagtaattattatcatcaaaaattatatagttaccgccaattaattttacattatttaattctgcaacatatatctcaggaaaatttacatatatagaattgctggtattaatctcattgatataattgggtatatagactctttgaggatgagcttcttttattagagaatatttaaaattatgagtactacagtattctttacaggtaatattatttagtattttttgaacacacattaattaagccacctttcacttttatgaaattcatttgttttttgtttaatttatctattaaaacttctacatccaaaatttcatctcaaaaaatctattatattattattttataaagattaatgtttatttgttacataactctaattattataaagattatgtgaatgtagtgttaggagtagaatgttataaagtatgttcaacctatattaatttaactaccttaaaaaaatcgtgcaggctaaacaaaacgagctctgcacttttagttttttaagaaacaccaatatctttgaagtattttttattatataatatacggctatcattaggtctaaatttaccagcaatttcattatgctcatatgcaagcttatgatctcctaatttatcataacaaacacataattgtagatgtggtagccatgtccaacatgcatcgttaaaaaatccccagctatcttttggcttttcaagctttgtagcttcttcataccaaaaagctgcttgtttatattttctttcatgtaagaaagaaaaaccaattttgcaacaggcttcagctctaggggtatcatattcaaagcttttaaaagcatattttcgtgcatcttccacttggtttactgattgatagtaatcacatattttaccacaaactctgatattgtcttcaaaccaaccttgtttagaatccaaaaatttattataatattcaagcgcttcatcatacatattatgatcatataattcattagcataataaagagtatctcttggtgtaaattctaatccttccttcaactttcctttatatatatcaagatttcttttaggagtttgttttaatttcttatgagttattgcaatatcactattgattatattacctgctacttgtagatactcatgaacaaatcctatccatttaaaattattctctcttttaactaatctattacgcctataactcatggtcacatttccgtattcatcaaaacctatattgtattttgcagttacagaatctacagaagtatctaaagtttcttttaatgccttaaatttttctgcatcttctggaagcaatacatcatctgcatccaaccaaagaatataatctttagatgctttactaaacgaaaaatttcttgcagctgaaaaatcatctatccatttaaagtcatatacatttgatgtatatttactacatatttctttagttttatcagtagatccagtatcagcaattattatttcatcgactacatttttgatcgaatctaagcagcgacctattgtatcttcctcgttttttactatcatacaaagactaactgttatcaagtaatcacctccaaaaaaattcacattatataatatggttacaaaatcattttgacacaattccaaattaattaagagtcaattgaaagatcataaaatatttttaataattttacatattgttttaaattttcagttgtttcaaaaaaaggatgctctaaagagcatcctaaaaattaaatattattaaaaagctatagtgtttatatttctattaaaagcagtacctgaagtaacgtttgctgctgctgtatagataactcgaagatcataagttgttgttccagttataactgctgtatcgacaaaagtgttgctaataacgaaacgctgagttccagcagccgctagtgttctttcaacaattctagtggaaatcaagataccatcacgatataatctaatctctaatgtctgagttgaatttgcagtagtgatattttctattgcaagagcgtaatcaattttaatattttgaccaactattgttggaacggctaatgttactacagagacttctgtgttaagaggaggatatacagctactccgccagttagttgattaaaattcaatcgtggtgcaccagtggctccggttgcaccagtggatcctgtaaatccagttgcaccagtggctccagtaaatccagttgcgccagtagctccagtaaatccagttgcaccagtagctccggtaaatccagtagcaccagtggctccagtaaatccagttgcgccagtagcaccagtaaatccagtcgcaccagtagctccggtaaatccagttgcgccagtagcgccggtagatccggttgcaccagtagctccggtaaatccagttgcaccagtggcacctgtaaatccagttgcgccagtagcaccagtcggacctgttgatccagtatcgcctgtaggtcctgttacgccagtgtctccagttggtcctgttacacctgtatcgcctgtaggtcctgttgctccagtatcaccagtaggtcctgttgctccagtatcaccagtaggtcctgttgctccaatgtctcctgttggacctgttacacctgtatctcctgtaggtccggttacaccagtatcgccagtcggacctgtaactccagtatctcctgttggtccggttgctccagtatctccagtaggcccagttgtaccagtatctcctgttgctcctgttacgccagtgtcaccagtcggacctgtaaatccagtaactccagtatctccagtaggtccggttgcacctgtgttgccggtaggtccagttacacctgtgtcaccagtcggacctgttacgccagtgtctccggtaggtccagtaattccagtgtctcctgttggtccggttactccggtatctccagttggacctgtaattccagtacttcctgtaggtccggttattccagtatcgccagttggtcctgttacacctgtgtcaccagttggacctgtaacgccagtgtcaccagttggtccggttgctccagtatcacctgtaggtcctgttgctccaatgtctcctgttggacctgttacacctgtatctcctgtaggtccggttacaccagtatcgccagtcggacctgtaactccagtatctcctgttggtccagtaactcctgtgtcaccagtcggacctgtaactccagtatcacctgcaggtccagttactccggtatcaccagtcggacctgtaactccagtatcacctgcaggtccagttactccggtatcaccagtcggtccggttacacctgtatcgccagttggacctgtaactccagtatctccagttggtccggttactcctgtatcgccagttggacctgtaattccagtatctcctgttggtccggttgctccagtatcacctgtaggtcctgttgctccaatgtctcctgttggacctgttacaccagtatctcctgttggtccggttgctccagtatcacctgtaggtcctgttgctccaatgtctcctgttggacctgttacacctgtatctcctgtaggtccggttacaccagtatcgccagtcggacctgtaactccagtatctcctgttggtccagtaactcctgtgtcaccagttggacctgttacgccagtgtctccagtagctcctgttgctccagtatcaccagtaggtccggttacaccagtatctccggttggtccagtaactcctgtgtcgcctgtaggtccagttacaccagtgttaccagtcggtccagttacgcctgtgtcaccagtcggtccggttacgccagtatcaccggtaggtcctgtaactccagtatcacctgttggtccggttattccggtatctccagtaggtccagtaattccagtgtctcctgttggtccggttattccagtgtctccagtagctccggttacgccagtatctccggtaggtccggtaattccggtatctcctgttggtcctgttgctccagtgtctccagttggacctgtaacgccagtgtctccggtaggtccagtaattccagtatctcctgttggtccggttattccagtgtctccagtagctccggttacgccagtatctcctgttgctcctgttacgccagtgtcaccagtcggacctgttgttccagtatcgccagtttgacctgttactccggtatctccagttggacctgtagctccagtgtcacctgttggtccggttgctccagtatctccagtcggtccggttattccagtgtcaccagtcggtccagttacaccagtgtctcctgtaggtccggttgctccagtatctccagttgctccggttattccagtgtctccagttggacctgtaactccagtgtcacctataggtccggttgctccagtatcaccagtcggacctgtaactccagtatcacctgttggtccggttgcaccagtgtcgcctgtaggtccagttgctccaatgtctcctgtaggtccagtaactcctgtgtcgcctgtaggtccagttacaccagtgtcaccagtcggacctgtaactccagtatcgccagttggtccggttattccagtgtctccagtcggtccagttacaccagtgtctcctgtaggtccggttgctccagtatctccagttgctccggttattccagtgtctccagttggacctgtaactccagtgtcacctataggtccggttgctccagtatcaccagtcggacctgtaactccagtatcacctgttggtccggttgcaccagtgtcgcctgtaggtccagttgctccaatgtctccggtaggtccagtaactcctgtgtcgcctgtaggtccagttacaccagtgtcaccagtcggacctgttactccagtgtcacctataggtccggttgctccagtatctccagttggacctgtaactccagtgcttccagttggaccagttgctccgatgtctcctgtaggtccagttgctccaatgtctccggtaggtccagtaactcctgtgtcgcctgtaggtcctgttgcgccagtatcaccagtcggtccagttgctccggttattccagtatctcctgttggtccggttactccggtatctcctgttggtccagttacaccagtgtcaccagtcggacctgtaactccagtatcacctgttggtccggttgctccagtatctccagttgctccggttattccagtatctcctgttggtccggttactccggtatctcctgttggtcctgtaattccggtatctccagtcggtcctgttattccagtgtcaccagtcggtccagtaactccagtgtctccagttggacctgttactccggtatctccagttggacctgtaactccagtgtctcctgtaggtccggttgctccagtatctccagttgctccggttattccagtgtctccagttggacctgtaactccaatatctccagttggacctgtaactccagtgtctccggtaggtccagtaattccggtatctccagtcggacctgtaactccagtatctcctgttggtccagtaactcctgtgtcaccagtcggacctgtaactccagtgtcacctataggtccggttgctccagtatcaccagtcggacctgtaactccagtatcacctgttggtccggttgcaccagtgtcgcctgtaggtccagttacaccagtgtcaccagtcggacctgtaactccagtatcgccagttggtccggttattccagtatctcctgttggtccagttacacctgtatctcctgtaggtccggttacaccagtatcgccagtcggacctgtaactccagtatcgccagttggtccggttattccagtgtctccagtagctccggttacgccggtatctccagttggaccagttgctccgatgtctcctgtaggtccagttgctccaatgtctccggtaggtccagtaactcctgtgtcgcctgtaggtcctgttgcgccagtatcaccagtcggtccagttgctccggttattccagtatctcctgttggtccggttactccggtatctcctgttggtcctgtaattccggtatctccagtcggtcctgttattccagtgtcaccagtcggtccagtaactccagtgtctccagttggacctgttactccggtatctccagttggacctgtaactccagtgtctcctgtaggtccggttgctccagtatctccagttgctccggttattccagtgtctccagttggacctgtaactccaatatctccagttgctccggttattccagtgtctccggtaggtccagtaattccggtatctccagttggacctgtaattccagtatctccagtcggacctgttactccggtatctccagtcggtccggttggtccagttgggcctgatccagtttcgcctgttggaccttctgattcaattgttacacttaagaaaggcctttgtgtttgcaatggccattcggtagaaaaatatcctataatagtatcaactatattttctattccaattaaggttataccattattagtgattgtgttatttatccatccattaactaaatccgttatatctatactaatataattaccaacatctccagcatttacatttattgagtatggggtaaagttagctataggagcattattccacgtaactgtattttctgtgaaatcacttgtatttatatatactcgaacagtttgaagtaattgtgctgaatctggtacatcgtttctagatacgaataaatttaatgaagcatttgatatagtgcttcctgggttaatgctagataaattgaattttaataaacttctataaacatcatcttcttggacaaacatgcctgtaaataaatcagttgatagcccaaaattggcattagggttcagctgagatatatatgcatcatctgtaggaattataaatatagtaggcatcccgccatctccttattttacgtttgcgttaaatattcttttgttattaaattaatgattgtagattgcgctattataatatatgtaaaatagaaatttttgacacttatgcttatatgtataaatctaaacaaattatcagttaacttattacttcaaatttgtttactttcattagtaaaatgtgttgaaatgaaatcataaaattgttctaataattaatgttcatttaataaatgtagaaatttaaattaatatacacttatattaagataattttttgatatattaaaaaggataaaaactatactattaaaaattatcgtatattgaaatagcaaaattttttatataagttatttttagtagtagactacattaatagtagtttttaaccttttatttcttaaacagacataaaaaaaaccctccgcataaatgcagagggcgatttttataaattaatctaatttcttaagagttaattgtgctccaactaatggtgccaaagttaatgttaaagctaaagctgaattatttcttaaagtaattgcatctccagcagcaagaactaagatagcacttcctgaaattaccccagttgtgacaagagctgaaataggagtagatgcatcaactgtaccatttacagcaatagcaatttgagctccaattcctgcagttatactagcaccataattaacctcataaacaccggctgttgaaacagtaactgttgttgctcctggtgtgtgtgtgacaccacttaaaggtccgttattagaaaatggaacatcggctccacctataacagttgcatcagctatagttgctagctgatatacataaccatctgcggctaatccagcaccagtatctccagtaggacctgttgctccagtatctccagtaggtccagttacaccagtatctccagtaggtcctgtaactccagtgtctccagtaggtcctgtagcgccagtatcgccagtaggtccggttacaccagtatctccagtaggtcctgtagcaccagtatctccagtaggtccggttacgccagtgtctccagcaggtcctgttgcgccagtatcgccagttggacctgtaactccagtatcaccagtaggtcctgttacaccagtatcgccagcaggtccagtagctccagtgtctccggctggtcctgtaactccagtatcaccagtagggccagttacaccagtgtcaccagtaggtcctgtagcaccagtatcaccagtaggtccggttacgccagtgtctccagtaggtcctgtagcaccagtatctccagtaggacctgtaactccagtgtcaccagtaggtcctgttgcaccagtgtctccagtaggtcctgttgcaccagtatcaccagtaggtcctgttacaccagtatcaccagcaggtcctgttgcaccagtatcaccagtaggtcctgttgcaccagtatcaccagcaggtccggttacgccagtgtctccagcaggtcctgttgcgccagtatcaccagtaggtcctgtttcaccagtgtctccagtaggtcctgttacacctgtatcaccagcaggtcctgttgcgccagtatcaccagtagctcctgtttcaccagtagctcctgtttcaccagtgtctccagtaggtccagttacaccagtatcaccagtaggtcctgttgcaccagtatctccagtaggacctgtaactccagtatctccagtaggacctgtaactccagtatcaccagtaggtccggttacgccagtgtctccagcaggtcctgttgcaccagtatcaccagcaggtcctgttgcgccagtatctccagtaggtccggttacaccagtatcgccagtaggtcctgtagctccagtgtctccggctggtcctgttacaccagtatcaccagcaggtcctgttgcgccagtatctccagttggacctgtagcaccagtatctccagtaggtccagttacaccagtatctccagtaggtcctgtagcacctgtgtctccggtagcaccagtgtcaccagtaggtcctgtagctccagtgtttccagttggacctgtaggtccagttggtccaggaccagttgctcctgttggccctgatgcagcaaacgttacacttaagaaaggtctctgagtttgtaatggccattctttagagaaatatcctatgatagtatccattaaattttctatacctattaaggttataccgttatttggtatagatccgtttatccatccatttactatatcagttatatcaatactaatattatttccaacatctccattggtaatagttatagaatatggtgtaaaattagctataggtgcagtattccacgtaacagtactttctgtgaagttacttgaatttgtatatactctaactgtttgtggtaattgtgcccagtctggtacatcatttctataaacaaacaaatttaatgaagcgtttgaaacatagcttcctggaggaatactagatagatcaaattttagtagacttctatatacgtcgccaacctgaataaacatgcctgtaaataagtcacctgataaaccaaaattggcatttggatttaacaatgatatatatgcatcatctgtaggacttataaatatagtaggcatcccaccatctccttactttttatctttgtttatcttttgtatttatttatacaaaataaatttagctactataatatatgtaaaacaaatatcatttgatacatgttgctaaataagagcatttaaaatatatttcacaatagatttcgttatcatcaaattacgtaatcaaaaataccaacttaataaatctctataaattaattaagttggtcaaccatcactaaatattactatttttatcattaatatctttctgaaactttgcaacatattcatatgaaagaaaatattccttcatatcattcccgataatactacaaatgttatttaaaaattcattatcttcttgtgatatttctgtataataatgaaatacataaggatttacatatccactttctttgaatatttcctgtatatcggctaatgtaaaaaaattattgtaatttcttacatttaatattgaatttttattatacatgaaacgtccccttagtaattctttgattactgaataatgcattatattggatattgtagctattatatatcctccaggcttcaaaaagtttttcaactctttcagtagcttccaaggattcctgcttaactgaagtctatctcctataattatataatcaaaaaagtttaatttattttccttaaatttcatggtgtatatatcttcgaaatcttccgtcattatttcaatcattttcccacatatctttgctatatttttatttgtttctataccatatatttgggaattaggatacatatattttaatctaaataatgtagctcccaatccacaatcaaattcaaggatatttaatcctttatcatttgactcagttatttgtcctactatatcaaattttatactgctgctattattagaattaaatccccattttgtttcaaatctttgagcatttataattaatgcattgttaaagttagtaaaatcttttttaaatgaagtactgccgaaatgatgtataaaactatcattgcaaaccataagtttatatccagcttctattattctcatgcataaatcatcatcttcaaaatttccaggtgtaaagcgttcatctaagtttccaattttatcaataaccgttctttttattagcatacaaaatgctattaaccttggtttttgttcccatttttcaggtgcggaaatattattattacttgcaaattcaatcatatggtcaatagtactataaggtacgttaataccttgatagtttgaacaattattagttataggtcctacagcaccaatagattcatcgctatataaacatatttttagattatctagccatctaggagccacctttgtgtcattatttaatagtaaaatatcattatctttttcagctgcatctattccgaggttgcaccctcttggaaaaccaacattttcatcatttaaaataagtttaatgtcattttgttctttaagccattctctagtaccatctgtagaattattgtctacaattattatttcataggttccggtggctgtatattttctaatgctttcgatacaaatacgattataatcaatattattataagttaaaattattattgaagttttcctattctcaaacatcaaacccatatctcctttaataatgttattatttataaattttttataatgttaaaaaataaaatatctcgattgtttattttttatgaatagttggattagatctctatattaaatagactaaatcctattatagtctttaatttgagatctttaaatttcttagttataccatttataatgaaatttatatgtatcattgagagtaatattaatggtaaaatggttatcttaaatttagtattactttaagataaccatttatcacaatgaaaatattaatttaatattttcaatcataatttatatgagcagtaataatttagtgctacattaaataaaaaagctgattacacacctatcctataatttctccattttttattataacggcattaggtgttgtaaatactgccactggttctctgctacttatatataatcttctatcaactatgaatgaaagatctatattagctgtgaaagttccagcgcctccagctgttggtgcaataaaattacttgttggaactatgcagtcaactgataaattaggagtataactatcagttaaagtcattctatttctattattaggccaacaaattcttcctgtgaacaccatattagttataccaaatacgctaagaggtatagcatttgttccaggttgaactaagttagttgtaacagctgtagcagtaaatctagtgcagcctattactccacttgcaactatacgtaaattagccacttggaaagctctatttctttcgattgttctaaatcttgttccaggttgagttggagggttgcagcagcaaggtggttgcaaagtgatagttccatttaactcatcaaataaatttatagcagtaccaggtgtagtactaatattaaataatgatgatggtgtaagtgtaaatgtttgtccattaattacaatttgactattaacaggaactgtttgtgctaatcctataaaatcgtaactaattcctatttgttgaatgcatactaattgacctgcaactaagttaggattaagactatctaaagtaaaagtaagattagttaatgatcctatatcttctttttcactaaatacagaatcaaataattcatctgctaaaattggtagacatactgcatcttctatacttccacaacttacacctattggaccgcatccttcacagctacagttatcctgcatatttgattgacagcttgtacaacattccattgttgatccaactgattgacattgtgctgtagtaacacaatttcttatttcagacataatttatatcctcctcgtattgaaatttgtcattaagttcgatgatattccatctttttctactttattgtatgaaatagatatatatatgtttccatctaataatgttgtttttttcttattattaaaaataatacataaattcattaaattaaaaatataaataatagattatttatttttgattgataaaaactagaatttaaaagctagttatagtaagaaagtgcttcaaattataaaaatcaacttgaaacactttttttaactacaattatttatatggaaatgatttttatgcattaaaaattcagtatattcaaaatcatctaaatcatcgatatctattgactttttcttatccatgataaatgcgtagctattttcttgatagatatatttatattttaagaagtagtgaacttttattaaataaattgctccatttaacctataaaactttccaagatcttgtcttcgtattttttttatatttgataaaaagccgtccaacttcatttcatcatttaaccttttagttaattgtggagcacaatcacattcacacatactaactacagagttcgcttttttctcacaaaataatttaaaagcgcctctaatatcatattcatctcgtagtggcgatgttggttgtaatatcattaaagcattatattcttttcctatattctttaattttaataatacatcttctattacatcaagcgtatttgatgtatcttctgctaattttttgtctctcaaaaatggaacccaagctccatattcttcacctattttcttatatttttctgaatctgtagatacgattacgtcttcaaaaactttactcttaattgcttcttctatagtgtaagccattaatggtttaccgtttaaatttttaatatttttatccttaattcctttagatccgcttcttgctgggattatagctaaaactttttcacacatataatatcctcaccaataataaattaaagaatctatagtaaaatcccaataaatttgcttatatggttgaaaacagctgacaagtttatacaaacacatatagcttatatatctaatctttctatcatgtttttcattgctttaaactcacccatatccagccaattcttatcacttataggatatatgcctaccttatctccatttaataaacactccttaatcaaatctgtcatatcaaagtatgaatttttaggaatatattttaatatatctgtttctatgatatacatgcctgtattaaccaagaactcatagtttggtttttcattaattgactttatgtctccattttcacttaggttaaagactccatatggaattacataattttttaaggcagtaataactgttattttattattattctttttatggctttctaagatccttgtataattggcatcaactaatatatcacaattacttaaaaaaaaagtacttaatgatttatcctttaatatacttaaacttcctgccgtgccaaggggaatttcttcttctattagtgaaatactatatggcaatttctgattaaaataagccttcattatttcctttttatcatttatagtaatataaaaatctttaaatctaaattctaaaaatttatttattattctttcgattattggtatatctccaataggaatgagcgctttcggaataattttggtataaggatataatcttgtaccttttccacctgccattataaccactgggatatcaatagtttcagtataatcagatgtattctcgtataaatcattccaaaatattatgtctataacttcctttacttcgtttactattggtatactttcaatagaatagtttttcataatatcttttgctttgtttatattttccttggttaaatatattggagtagtattcattatattatttattgatgatgataagtctccgtttgctaaaatccatcttcttatatctccatctgtaactactccaattaatttattactttccgttactataagaacccttttagcagttttagttaatttttcgattgcttttgttatagatgtatctctacttataaaaagagtttgaatattcataagaacactccttgagttatttacgcttttttcaaagtgtttatgatatattctatgctttctttttttaagttggtactgcatggaatgtttaatattttattataatatagattagctttttctattttataagattgattatcaagatatggtttttgagtgtgtattaatttccaaataggcctagtttgaattttattttgtgataaatatactaataactgatccctatttaatttaaaatcatttataactaatgaatagaaccaatgattgtttctggcgtccttattatagtccaaaagagttaatccttttatactgctcaattttgatttatataactcataatttctaatttttatatcaataaattcttctattttttcgagctgtgctacgcctaaagcgccttgcagattagtcattctataattatatcctatatgatcatgcacataatacaattcatcatctttcgcttgtgttgacagatacttggctttttttatatcctcatatgatcttgatactaaaagtccaccaccaccagtagttattattttgtttccattaaatgaataagctccaaaatctcctattgttccagcaaattttcctttatattttccactaaggtagtaggttcctagagcttcggtagaatcctctattaactttaaattatattggttagttaattcaataatcttttcaatgttagccatatttccgaagacatgtacaactataactgcttttattattttattagttaatttatttttcaatccattttcggtcattatgcattgagtttctaagaactctttaagcttataataatctagatttaagctatcatcacaatccataaatattggatctgcgcctaaatatttaactggattaacagctgcaataaatgtaaggattggaacaataacttcgttattatttgtaactcctgataatattaatgctaaatgaattgcagcagtgccactttgacatgcaattgcattatctacatttaaatagctttttatattattttcaaatttgcttacataatttccagatgtagaaacccactcacttctaatagcatctactacatatttctcctcatttccttttagattgggtacagatagaggtatcatggtttcatctccaaactttttcttatatttttaatatattttcaattgtcttttatatatattacaaaaataattctaaaaatattgcaagaattctagctgtaattgtgaattctgaaatgtgcattgtgaattgcaacatatatattagtctaatctctcttttaataacataaatgcctcggcatttttatagcctgaggctccacccctgaatactgagaggccttttactacatcaacagaccttgggaatggtgcttcgcctacttcacttttaaatatgctaataatacttagctttttctctaaaaactcttctatattaacaaatacgtttggattaaaagttcctatagaattatttattccaaattcagtttcggacaatgtttcataggcatatactttttttattttctcatgcctaaaccattttgtgcaggacattgctgcttctgaaacagttctatggtcgctatgtatatctccataattaggtatatacatagtatcgcattttgattctacaatacattcagataatttttttactaaatctttaatagggattttatctaataatgttgttggaaatcctaatttaaataccttttcaaatttatattcctgcgctactgctgaaatttctgactctcttctacttatgatttcctttgaaaagcctaattcttctttcatggaagtcactatcgcccaataaactttatcgccactttttatatgttttagtatagttccaccacatccaaaagtttcatcatctggatgtggtgccacaactaaaatattactcataatatccctccattaataatgggtcttctgatttagatacataggattcaaaatttaaacttctcattaagtttataattttatcaatagagtctccatttccatatggacattctactttacttaatgagatctgaaattctatagtcataactttttctatgccttttattatgttattgattccttgttcaacaaaaataacatttgatgcacataaccttcctttttgtctatttccaacattaactgctcctaattttaataagggagcttcatataatccagcgctcgaatttccgatcataaacatacagtttctaagtaggtttacaaacaactctctagaaagatttttataaaatttaaagttatctttacttgagtatttatctattatttttattatttctttatttcctgcatctacatttgggtagctcacaaaggtttttatggattttttctctaaagctattagaatttcctcaaaatgctttccagcttcattttcttcacctgcaaacgggtgatatatcatgactgcataatcatcccagcccggcctatccagattattaaggacgtcattcttattaatgtattttgtagatatgaacttatctaaagcaggacttcctacattgaatattctgcgctcattttcaccagatcttatcaatcttttttttgattcatgattacttacgaaatgaagagatgataatttagatacagcatgccttattggattgtcaatatttccatctaaagcgtgatcccctccaaaaaaatgtatcgtaggaattctcaaatatgttcctattagccctccaacaacaacctcttctctatccccagcatatattataatatcaggtttgtattctactattgtatgaatacagtcttgtagcaaaatagataatgatttaattctagatgctctagaattagaatcaatcaaattttcaatcttggctattactggaattccgtcttgcactatgttgttaaaggtgtacccatatgtttcggagaggtgagcacccgatactattaatttaatttcaaaatcctttgattcattaagttttttatataagaggcttaatagatcatagtctgatcttatccctgtaaatcctaagacttttttaatagacatccgaatcccccatttgaatatcccaattattataattactcaaattgcttatgttatttttaatgtatctaactccaaaataagaaattggttcagtgttaacaaatccaattttttcaaccattccatgggtattactattaagatggcaccacatattaatatattttttaccattgcctttttctatatctataatgtattctagtaaccttttggtagagaaatcatctaacgaattaacttctactatatcagattcacttttgttaaaactcttagtaattattgatgaaactacatagttgttttcaagaattatataattagcatatttattcgtagggttgtccttaaatctccattttaaataatttaaatctttatatacctttatcttattttttttattatttataagctttgaataatctaataaaaagttattatcattaacaacactaatgcttattggactattagatttatttatttttgacaaatctaatttcatagttgggatttcatatatattattccaattcaatttttctacaaaaatcgaatgagaattattgtttggaaaaccagttacagctatatagttatcttcttccatcctcttatacaaatcagtagctagcttaggaaacaatccttttcctctataatctggatgagtcatcgtggtcatagacagtgcggctttttctaactttccatcaatataaattgtatatggagatacagaatagtttgcaactactttattattatccagtgcaatattgataagaagatcatcaagcggattttttatgtatctccatattaagaattccttagatacctctttattaaaacaatacataaagagctcttgaaattcctgtattctttgtaaatattcatttttatttatgaactcaaatttcataaaactcctcccagcttataaatctataagttcatctttttgaaaatctctttttgctttttttcctataacgtaatcccaattcttaggcgatacacctgtccctggcctctttatacataaatttttttcagtaaaaacttcgttggcttttatgtgaactttgtctaccaagcttttccttcctactatactatttaccttctctgaaagagtttgatgtttgattccatttccaagagctatttctatatttctaattgcaataaccatatttctaagctcaaaaggttctatacttgccttatgatctggtccaatcatatttctatctaatgtaaaatgtttttctattactgtagcaccaagagctgcggctgctatagcaacttctattccgctggtatgatctgaatatccaactggagttttaaacgcttttcgtatggtttccatagcttttaaatttacatcctccatttttgttgggtagtcagtattacaatgaagtacaacaatatcttctgttcctccagttcttaaagtatctaatgcaaattctatatctgataaattactcattccagttgataatataactttcttttttagcatagctatttttctcaaatacggaacattatcgatttcacttgaaggtattttgaaaattttcatttctatactgtctaaaaactctatactttctaagtcaaaaggtgatgataaaaatattatattcttttcctcacaatacttttttaagtccttatattgatcatgacttaattctaattttttcagcatttctaactgtgaagtttcttcctctaaattgttaatttgatatttagcttgctttgcatctttagttactaaattatttgcattaaatgtttgaaattttattgcatccactccacaaagtacagcattatcaatcatcttttttgctatgtttatatccccattatggtttactccagcttcagcaattataaaaatactattcatgaacatgtggcctcttttcctggatttccatagaccttaagcctattttttatatccttaattatgacggagcctgctccaataattacatcatttccgattgtaacattttgaataatagtagcatttgttcctacatgtgttctctttccaatattaacgctgccacttaccgttactccaggtgctaaatgaacaaactcgcttatattacaatcatgttcaactatggttccagaatttataatgcattgtttttctattgtaacttttgcattgataattgcacctttaccaacaaaaactccatcattaattaaagcgctctccgatactatagctgttttatctattattttaggaaaattatatccaattttttttagtatgttataaagttttactcttatgcaaggattgcctacagatccaacagaaatgaacgcgtttttaataccagatttatataattcacctaaattttcatcactgcctataacatctatacctagtcctatattttcattgattttcttatcaacaattcctacaatttcaaattcttttaatccatttagtgaatcaataatacttttgcaatggccaccaccacctactaatattattctttccataagacctcctataattattacttataatcttcagcgatattttcatagtttttcggaatcaaaatatatatcatttcgctaagttaccacctaaatctggctttaaaattaggtatctatatagataatacaatcatgaactatacttagactatgaaatatcttccaaccagaaatgagtgatatacttttgtggaatgtttcattggtgattttgatggatgtgattctttggctataagttgttccaaatgtgctagttcacagcttgttctttgaggctagcactttgggtgcaactttatagccttagaatcacccatcagaattgcctagaaactggaacaaaagtatattattcatttcggtgaggtatgcgcataagtatagattatagttggtttatctatagaattgaactattaaatattatatatatctgttttatatttgtttaaatttttccttattttaaaccattcaatagtttctttaataccttcttcaaaagtatattcctctgaccattgagtaagtttttttagtttttcattggatccaagtaacctgcttacttcactgtttttaggtcttattctttcttcatcacatataattttagcctttggatttaattgctttataagctcttctgcaagattttttattgatatttctctttgactggctatgtttatttcttcccctattgtattctgacttttcgcaatttcaacaaagccatttacagtattttttacgtaattaaaatctcttgtaggcgttaatgctcctaattttatttcattttcacctgataacaactgcattattattgttggaataatggctcttgctgactgcctaggtccgtaagtgttaaaaggccttactattgttattggtaaagaaaaacttctataaaaagactcggccaatctgtcagcacctattttagtagccgaataaggtgattgtccttgatatggatgatcttcagttattggtacaaacttagcactaccataaacctctgaagtggaagttattaatattctttttgtatcaagttctctagccgcctgtaatacatttaaagtcccttttatattagtgtccacatatgaatcaggtgaatgatagctaaaaggaattgctattagtgctgcaagatgatagacttcttcaatatttttcattgcttctctcacaccatttgggtctcttatatctccagtaaatatttctatttcctttaacttatctttacttaatgaatctaaccatccccatgagttaattgagttataatgtataaaagctttaacagtacatcctatgtttaaaagtttttctattaagtgactacctatgaaaccagctgcccccgtcactaaaacttttttcatttattgcctccaataatattagttttcattgatctaattcaaacaaattctataacttagattcttaaatttacttagtttattattaaaaacttttattttgtagtaatatcttatgtcataaatgaagcaataaaattctccattataatttgtagtagtatagccacaaaattttttatgatattttatttgatttgaacgatttttatatggaaagtatgcttcaagaaaaactactgcattttggactggatatccattttcgtagcatactttacctcttattatcacttctttaaaatatgatttataattataatttttcattttaggattccttctatatcaagtaatcacttttgattgagcagcttaatttgtggttcatataccttaattttatagttaatattatagagtttttcaaggactatagcgtattctccatgcttgttagaaattgtatatccgacatcaattgctttatatggtttataattataatctattttttttatagcaataattgccccatctatcggatttgattttctatctaaaatttttccttctattaatattgttctttttctttttactacaatttttttgtttataatcctatgcaactttaactctcttggagttatcacaatttctgcatatgatgacaatttttcatatctcctttattttaatatttaaaggagaatatactacaatttcataaaacatttctggcaaagcctctatagaaagtacatattctccttcattatcagtgtacgagtaacctaatacttttctgatattttctttataatcaacttctatgacttcaactgcagcacctgaaattggctgcattcttacattgtaagcgacccctttaataatgaccctttttctaggcatcataattatatttagtttatgatttgctcttgaatccaaattatttgtgttaatcaatattgaatcttgtgaacatgtgctaacttttttcttaccattcctacttttcttcattggcattttcagtaaatatagttactgtcatatcattatcttctgttgcatcttcagctggtattatggatccagatatttcttttccattcactataattttatttatctttacctctttataagattttccatctattattttttccataaaatttcacctctactgatttattgcataataaaattctgcaaatgtttctaatgctaatgatttaaccttctcgagaagctgtttcattttaagaaagtatgataagaagcacttactttgatagtttaaatttgaagtcaaagcttcataatctaaagcattcatattaaaaatttcttcctttacatcaaacaagaatttattatagtatccgccaagataatacctttccttagatgattcaaagtcatttacgatgtccataacgtctagaaacttttgaaaatcttcatcattttcgtccatatcaattaaagatttatctaattcatttgttaatagactcttgcatagagcttctccattatttgctttagctatatattcttctagatattttattacatctgaaacgacagcctctgcatcaacttgtatagatttatctacaatacactttttattaagattattatttgtatacgtcttaaatacatcacataattccttatgaggtgcacctttaatttctgctccataagatacattaataaattctacctgcttatgcgttttgtagaagtctatatattcttccatttttaatcgtaagcgtaaaaaaattaacggatagaaaatgcaatcctccattgttaaaattagcatagattttaacaatggaggtttatttatatgaataataatgaaaatataaattggagagaaatagttgctggcttttcttcttacgaaggaacgttaggaaatttctgcaattcaaatcacattactaaaagtcaattctattactataaaaagaagcttaataatgaaaataataatttacagtttcatgcaatttctatgaaagaaaaaagagtaagaactgagattactgtagttcaagctgatagacctaatataataatagaaataggagtagctaaagtacatgtaccggctaatgaaatagctattttaagtaatttacttaaggatctgattacaaatgttcaatcttaataaagttaatacagtttatcttgcatgtggtataacagatttgcgaaaaagcattgatggactagtagttatcgtgcaaacgcagctaaagctggatccgtttgaaaaagccttgtttgttttttgtaataggcaaatgaatagaattaaaatcctccactttgatgaaggattctggctatattattttcgacttgaaaatagtaaattgaaatggccgatgactccagacgaagctcttaagattaacaaagaagaattgaaatggctacttatgggatatgaagttagaactaagtctaaatttaagccaattgaagtaagaaacagcttttaaagcaaatattgctataagcccttaattttgaacttttacaagtttcggaattaagggctttgtggtaatatatgcctatatttgttgtgaggtataaaaatggatattttagatttagagaatcagctcgatgaaaaaacaaaattattgatttctaaaatggaagaacaaattcaatcaaaagataaagaaattgataatttaaaaaaggaattagcttttcttaaaggacaacttcttaataaaaacagaaaaatttttggacaatctagtgagcaagttgattcaagacagatatctctttttaatgatgctgaaaaagacagtgatctaaaaatagaggaacctaccattgaagaaattacatataaaagaaagaaatcatcttctcattcagggaaaaaagataacttatccggtctagatagagtcataattgagcataaaattaatgattccgaagcagtttgcgataaatgcggaaataatttagttgtaataggcaaaaaatcaaaagagattttaaagtataagccagcagaactttacatagaggaacatatttcgtatacatatgcatgcaaaaattgcgaagcggatgcagataaagtcaatataatttcagcaaaaataccaaatacattcttatataaaagtatggcttcaaatgaattattagctcatgttgtgagcatgaaatatcaatatgcaatgccgttatatagaatggaatcatattttaagatgatggatgttaatctttcaagacagacattatctaattggataataagttgtgcaactgagcttaagcctgtttttaactatatgaaagaggagctcttaaaaagaaattatatacatgccgatgaaacatatctgaaggttattgaagaaaacggaaaagattctaactcaaaaagattcatgtggttatatcgctccggaggcattgaaaatccagtaattctatatgattatcaaaaaacaagatctggatcttgtgcagaagaatttcttgaaggattctcaggctatcttcaaacagatggatatgatggctataataaggttaaaaatataaaaagattatattgcatggctcatattcgaagaaaattctttgaaataatatcatcattaagccctgaagctttaaagcaatcacatgcattagaagggtttaattattgtgagcaactttatgaaattgaaaaagagctaagggaacaatacatggggagtgatgattattatactgatagacatataataaggctcaagaaatctgcccctatccttaaaaaatttcaagaatatgtagatagtgaaattgttgatgctcttcctaaaagtcctttaggtaaagctcttgcatatgcgcaaaagttattgccatatatgagaactttcttaacgaacggatgtcttgaaattgataataatgcagccgaaagagctataaagccatttgtaattggcagaaaaaattggatgttttccaagacttcaaaaggcgcatcgtcaagcgcacttctttatagtattattgaaacggctaaagccaatggcttagcaactgaaaagtatttagtatatttatttgaagtgttagcaagttcggaaattaaagaaagggacatactagaaaaatgtatgccatggtcggaaaacattccagatcaactgcgtgtcaagactaccaaataattaatttacatataaaaatatacctaacagagaatttaaacttttctgttgggtatattttatcacttaaattgcgctatcgctacgcgtcgattctttgacgcttacttttaatctaaattgattaagtgttatattagtccttattttttcaccaaatatattttcaacttttaaacttgcttcataattttttgtatcatcactatcaaatatagctgattctgaatgatgtttatcataagtgaaggctaagtcttgtcctactaatattattggagagcagcccataatatttgcaatatctatacatgtatgcgctacagatcctcctaaaaatgttcctttaagattatttaattcctgtatagtatttgataagaaagttgataaataaatcttttccccttcataatctctaactaaatatctattactatattcataaaatgctaagggagaattttcttttaaataatccttcatcatatcgtaattatcatctactggatctattgaaactaacatatctggttttatattattttttataagggcttttaatgtcctgcttccagctattatgaagtatctttctaattcttttttatgcgtaaccatatcggctatatttttatctaaagatggtccggcagaaactactatggctgggatacctttgtttatatcttcataagaattaagaggggttgaattttttaaagctttcaaattagctataaaattcttgataaatatatctttaaatctatttgcaacacttatggaagagcatgccgtataatatgcatcgtctaaattctctataaatatttcataatcatacttgtagacttcagcataatttccaaaagcatgaacatataaattattgaaatttgtactgtttatttctttatataaattagcttttatattatttttatcataaaaaatcagattaatattgtccttattaatcttttctttattgtagttaaatatatctttattgggttcaaatattagtaccttgttcttttcacatagcacatcatgtaagctatctaagtattctcctgtatcgattccaaaaataagaattaatgaatcgaacttaatatcatttactgagcttaataaattttcaatttcttttttgtaattctctttatcagccagataacaattattatcatctttttctatactaaaaacatgataaccatctaaagtttttaccttttgcatactatccccttatttacctctaaggtattttttatttacaatatataatattaaatattaatttgtttgatacgaatatttcgggtatatattaaagctatcccaaattaacttataaattattttgggatagacacattcatatatttttataatcctaagcaccaaagaatttgattcttaattgagttttagctctacaagttacaccgtatctaccacttgcatctgtaaaagtagtgtgatctgctgggtctgttgttaatctagtactttcccaaacctgaacagcaccacttcccatagcagcgccagaagggcttacagcagttcctttcaataaaaacattccccacgtatttgtgctgattttttgagtaaaaggcaatcctgagtttgcttcacttgatggcactaccattgtttttggtttataatttgccataatattctctccttacatacttcttctaaagttattctacctatataatatgaaaaaaaatttgtattgttactataaataacccaagtgaaacttaaacttatgcatacaactagccgaaataaggattatgctgttgtttcagtttctaaggaaattatgattgatgattctaagattacaagttgcgcccaagatgctagccttaaagacgagcgctcacagagaaagttcgaagaacgaaatataaaatttcgattctcactttttgaactagcataattggaatagtttaaaggaaactcgattcattttgttcactgagtaagttcaattgaccaaatcatagatttgaaatttcacttaagaatcagaaccatcaaattcctaatgaaatatttcatattatgacccttgtggttacaaaagcataattcttatttctagttagaatatatttcatagtataaatctaacttataacttggcatctataactttatcatggcgaatatgcagttaatttataagcatatccttttttccataataggggtattccataagagccatcatctaatgaaaatgttattcctatatttttttcaactactggattcaaagtgttgtttatttgaataatttctatagccgcacctgacaatggctttccatgcggattacagactgtacctttaagtagtatgtatttatcatttggtagaatagcattcagagttattattcttttttttagtaattcatttcctgatattatctttttaaccatagcgcacattaaactttgtcctcctacaccaattgttacactattaaatatgtttccatgctttatattattaaaagaggtactttaacgtgcgccatagaagtaattttcttataactctaaataactagattttgtatccttaaatttttatattttaattggaatcaaaaaagagtgggatcttttgtatatcccactcttttactgtagttgttattcgttagattcataatttgttatttctttaattgtattatcctcattcataaaaacaacggaaggcttatattttctcgcttcatcctcattcatttgcgcataagctattataataaccttatcaccaggttgtactaaccttgctgcagcaccatttaaacaaataactcctgaatcccgtttacctggaatcacatatgtttcaagccttgcaccattatttatatcaactatttgaactttttcgttttctaagatacctgctgcttccattaatgttttgtctattgtgatgcttcctacataatttaattctgcctgtgtaactgtagctctatgtatctttccttttaacattgtaagtatcatttataaattcctcctaatttatataaatataataataaaattgatgtagttctcttcccttactcatgataaactaattatttttatattctaaggttcacattataccagaaagagagggtgcttttttgtgcagtgatattctctagcgaccgaaacaacagagtaccctctctttcggttgtataagtttgttatttatctatatttcaaatgtaaaattatctattaatcttgtttttcctatataaactgcaattggaatcaatacatttctctcaatgatttcaacgctttttagtgaatcactatctacgatttcaacataatctatttttgctaatggttctgaatttagtacctcttttattgcatttttaatattattagcatttctttcaccttttcttaaggcatctttagctatttctaaacttttacttaatactaatgctgcttttctttcatctttagaaagataagtatttcttgaactttttgctagtccgtcttcttcacggattataggacaagcaactatttctacatcaatatttaaatctctaaccattctttttataacagccacttgttgagcatctttttctccaaaataagctttatctggagtaactatatttaaaaattttgaaacaactaaacatactccatcgaaatgccctggtcttttagcaccgcagagtacacttgtaagacctgatacactaacactagtagatttatctccataatacatttcgcttggttctggattaaacactattgctgcacccgcattaacacaaagttccaaatctttatttatgtttcttgggtaactatcataatcttcatttggaccaaattgtgttggatttacaaatacgcttacaacgaccttatcattttcttcaacagctctttttataaggctctcatgaccttcatgcaaagctcccattgttggaacataccctacagaaagcccatctctcttccatgctttaatcaagtttctaagctctttaatctctttaactaacattactgatcacctttctcatcctaatactaaaatttaggttcattatcacataagtataaatttagtacaatttctttaattcattttcatctattttaaaagtatgtttttcttctggaaaagcaccagcttgtacttctttaacataagagctaatggcatctctcataacggtacccacatttgcatattgttttacgaattttggtacaaaatcattgaacatgcctaacatatcttgataaactaaaatttgaccatcgcaatattttccagctcctattcctattgttggaattgaaactgcatttgttataagctctgcaactttttcaggaattccctcaagaacaattgaaaatgcccctgatttctcaataagtatagcatcatctataagctgtttcgccgctgcttcactctttccttgaactttaaatcctccaaaagcatttactgattggggagttaatcctatgtgtcccataactggtatttgagcatctacaatagctttaatttgtgctgcaacattagcgccaccctcaagcttaacagcattagctccaccttctttaattaatcttcctgcatttaaaactgcttgttcgatagatacatgatatgataaaaaaggcatatcacttactataagagcatttttagcacctctcttaacagcttttgtatgataaatgatttcatccatagtaacagctaatgtatcttcttcacctttaataaccatgccaagagaatctccaattaaaatcccgttaacaccactttcatcaatgatttttgccattgagtaatcatatgcagtgagcatacttaatttccttttctcttctttggcttgtttaaaagttaatactgtatttttcactaatttacgcctcctaaaaatttataaatttccaaatgcttctttgaattacttaatacattttctatttgactcttattttccatgtcatagaaacattcttctatgttttctgtaatatctgcattatttttatctctcaaagccacaagttttaatagattaaaagataatatcttatataaatctttatctttatcatctaaaacagaaatatgcttcttaattgttgtgatatctcctcttgctataggacctgttaaagaattaacaaagccttttgcataaatactatcaatgttaccctttattaaaggttttaaagcatttaaagcttcttcatcatctagcccaagtttttttaaataacttgtacctatatcaagcaaagataatgctaaattagatacaaaaacgctagctaaatgatatgttgaggaatcttctgcttttctaacaaagtacctatttccaatgagcttaagtacactaataatagatgaatcttctaaaatatcaccttcaattgaaaaatatatatcttccaattcttttaagtttgtttctttactagagaatgcaaatattggatgtagagaataaatcattgcaccagaatgtttcgcattacataatacatttgatttgagtgaaccacttgtgtggcaaatagatttgttatttagatcaaattttgataattcaatatctataattgaaatgatgtcatcaggagttgtaataaataatatatcactatctttaataatatcttgaatgttgttataaaatttagattttgtaatatttgctgcatccatggtatttaagtcatcttttccataaaagccgcttaattctatccctttatgagtaaagtagcgtcctaaactcacgcctaccttccctgggccaataaatccaatttttatggtatcacctccatatgcgtgtgagtgatacaacatcctaatttcaatctcattcattatagatatgagttgtattatatataattaatgctaaaaaatttggtgtaactctttttcgatactacccacacatattctaccactatgttttgattttaacaatgataagtttttttaatttgaatacaaaaaaagcaagattactttttaattcttgctttctcgtatttttataaaattttacataatttcctctatagtaattacattttcaaggctatgaagctttaaaatgtactctgaatgattaattttttcaggtaatgttaaagtcattctaagcccaattatatgattgtcaagctctttagctttcttaagttctagattagaaatctttgttccgtctaattttattgcattcataaagttcgtaacgcctgctatatgcttgagttcagcatatacatccaattcgttagacttagccctataatgtaaatctgctttatgaagtactgttaatacacctaataagaaaaagcatgaaataatagcgccttcataaaaaccaattccaatggcaagtcccatacatgcgcaggcccaaagaccagctgcagttgtaaggcctttaacttcattacgcccaactacgataatagtacctgctcctaggaatccaataccacttataacttgaatttgggcaatattttaacgtattttcctatattttaatgtattctgttgttagataaaatgcggcttaaagcacaattggtattttattgtaacatattatatttttgcgttaagggaaaatacaagggaaagatttaataataaaacaatataatttgctatatttatgatactatactaaacccactggcatcaaaacaaacatacgttgccgtagttttaagatatatatttatagccaactgtttaagtaaatatataactccacgtacttttatggattatttggggcatactggtattaatgtaatattaaaaataaaaagcgattaaactcgggcgttatggaatttccgagagtactctagttatatgataaaggatatttcgatcatgagacatactctattagttaaatattatgtaatttattttgctttagaaacttgattttctaaagtatctaaaatatcatttacccaaacaactcttatcatttcttgaattgtattcatatctttatttagcatttccagttgattttgagattccttaatttctttacttatttgctttataaccttattattactaattagagattcaatgtcatcaaccttactactgatttgctctgtatctttagctattttccttatttcaatatttaaatcagctaaatgtttcttatttgcgacacttgattttaaaactttatcttttatatcttctattacatcacatattattttctgattctttgtacttttattttcaaaatcaataattttttccctaacagtactgaattctttagcgatattttcttttgatttattattttcagtattcatattatcgaaaaatgtaatgcttacaccaattaaatttttcatatcttctagttgtttttttatatctaaaatatcatttttgcttactaatccaaaaaaattccaaaagttcattattaacctcccatttagttaagtgaatcgatgcaagcttcacttagttgcatttttataataagttcatctttcaattttttcacttcttcttctgtctttaacttactatcttctagcatattaaattcttgtatttttttatctaagtttaatttaatatcttctaatttttcttctattacatctgtgattatatcattttgttcctttataacatttttaatgtcttcaactaagttctttaatcctaactgtaatatctttttagaaaaatccttcatagcattttcttttgcagtaccagcatccatctttaaaacttctaagcattcactatcatcaatcgaaactctttttgaaatatatagcttcaaatttccttttatttctttctccaccttactcatagttctttctatcctatttacatttattttgacttctgattcagaattatgtaactcacttatcaattcttcaaaataaaccttactttctttaattgcagttttctcaatttcatctgctttcttctctagttttaaagaaaattctgctaatatcatatttatttttttagtatcttctgttcttgcactttctttctcatatttatcagtgttaccagtatcatatgagacctcttcacatgctgtttgaattccttgtcctactctctgcaatgtttctgaaccagtccaatcaccgaccttttcaacaacttttcccaagcctcttcctatagctctaccaatacttccgaataatcccacattaatcactccataacttcatttaatatttcatcacacaataaaattttctgtttcccaatttctaagaaattattaaaatcatactcattattatcttgagacttctctaataaatctaattgttctaatataacttcattattttttcttatttctgaaataacttcatttaaatcttccgatacttcttcgccaagttcctttgttaataaattaatttcgttaacaaactcgctcaaaacttgtttaatcaagttttctttaaagcacaggacccgctctttttttaactctccagctggtaaatttaatagattttttaaatcgatattatttaattctatttttctatgaatgttttttaccaaacttccatcaacatcctttttaagcttttcaatacttctctttataaacttactatgtaaatttatgtttttgctttgttctacagcttctattaatattattaattcctcatagtattctgtacattctaatataattttttcttctattttatttacatcattattgatctcattagtaaattcattcaataagttattgtagtatattacatcattaatattatcttcatcatacttatcttttttcgtaatttcttctcctatcttgctgttcattgccttgtccaagagtttttttcctacttcaattataatatcaactaatggactcggaaatgataacggaataggtaacttaggaaacctctgcaacatttttatttcctccaaagcccatttatagtatcaaataattcttccgcccttttagatgtagctacttgtatctgttttagtactttttgcatttctttttcttctgctttattttcctctaattgctttaaactttcttctctcttttttctaatttcttcaattccttcattactagctgataaaatactcatttgtctttcttttattgaagtaaactttgttattatgtcttctttagtgttcttataatcctgaatcaaatcttctaataataatgttttatgcttttctattatctcatctcttaattttatcttcaaattatcaatatttgaaaaattattaagtttatctaaattttcttgaacatctcttattctaaatttcctagcaatagaatctaaatcccaccaatcatctgaatcatcttctatattagaatactctcttacaagattacatacatgtgaagccacagctatgacatttttctcagctaattgtgtactattataacaatcctctctttttaatattttcatccattcagctctttgttccttccaattttctattggtctattaagagtatctaactgagttcctattacatatattttttcaggattatatcttgcattagcaaaaacactataaattgttgccaactctccacctgtaagagcatcagattttacacaaactaacacagcatttgctctatctatatattttctagttatgtcagatctatactttacaggatcatctaaaccaggggtatctacaaatacaacgccttctggtaaaagaaaatcttttaatccaacctcaacttctttaacaaaatagtgtgttgcctttttagatgacgtccatttttgtatttcattttttaattcatttatatcatcaaactcttggattaagctttctttattaatccaattagctttttctttttctgcacctaaatttttaaattcttctaagaaaatgtcagatttagactgttgtacactattccatagcatatcccattcaacatcattataaaaagttaattttatataatttcttcctttagaagctctaaactttgttagagatgcagtttcaggagttacagctgttgaagctaaattatttcctagtaaggcattaattaatgttgacttaccagcttttattgcaccaacaaatgcaatatgaaattctggatttgaacatttatttataaaagcatctaatttaaaaactaatttttcattaacttcttctttaagcttattgtgttgaactattaatttaactttattaatatttttggcatatctatcaatagtattatcccacatgatatttacattaattttatttcctacaccttctaaaaattctaatacttcttcttttttttgcatctttatttctcccctcgttaataaataaactttatattttttaaggcaaataattatatgtaaagatttaattatataaatctgaatatatttatgcctttaatttaaactcctcaaatcacaacttgatttcaaacttactacaaaactccccacctttttgatcagtatttcttagtaagcacttcttcctaacattggcgtcatattgccaaattccaaggtttggagttttaggatttatagctgaattagttggatcataccagtgcttacaaaaagcgcatttcttcatcattttagaattaatatttatctcgtacatttttatccctcatatcatttattgaatttcagtatttattaattttgcaatttactatttattaatagttgcacttaaagctctatttcctttataaagcttataatatcctctttaattaccgaatcacttatctctctaaaagcatattccatacaccaataaaagtgccttataaagtaaaaatctttttgaaattcttcgtcagcatatttcattatttcttgcgtacttttttccacatattgattggcatatcttttcccttttatgtagtgatttaaatattcccttggatcttttattacttcatctaaatgttcttcaattagattatttatatattcatcttcagtaattacttcctctacttttttcccatttttttcttcaatagattttattcctctataagattgttcactttcataatatcttgattcttctggaaaaatcgaattatattttctataactcgtatcaaaaagagagtcatagctataagaaaaatcaatatttttactatcttgaagccagtaccacttacctaggttagaacatttttcaaatacaaataaatttaatttaatatctttttcctcacagaattcattgcataattcaaaaaataatcttacataattttcatttgctttgaagtttttatagttatcttcatgaatcttatattctttataattaagaatacttttattagttaccataaaggtattttcatataatttcttcttataatttgtaaagattttaaatattagaatcgcatataagctttttctttcttttgatgaagttaaaaatttatgaatgtattctaaattttcatcaaaatattcttcatttttaatattactttctacatatcttataaataaatctcgtaaaagcttcttcttttcagttggaagttcttcaccttttattatttcatctttctttaatacctgtcttataaaactttcataagctttttcatgctcatttataaactttagtttttctaaaaaatcatctattttttcttttaactctatatacctcactaaattttctttgttcttttctcttttaattatcttttttaaattaaaaatataatctatatcacatataaagcaagctaataatggaagtacttcttttttattctctttacttaataaatccataataaaatcaaatttattctttaatgagattttgttattttcagctaaggctgttaattcgtcatgaaaacctcttaattcctgtattaacgcttcagttcctttattataacttagaattatttcatcatcactaggccttccctcatctagctttaataagtaatcgcaaaattcactttcacttaaattgaaaatttcctcttgagctatctcctcaatattatcattatatattaatttttgattttttcccaatattttcacctcgttctttataaatcctaacattttgacaaaaaaatctcaataaaaatcagttctaatttttatgattagaattgaattcatttacagctatagattatattctgtaaataatcaattattataatttcaaattctttatttacttcttcatttagagtttttttcaatatgttataaaattctcttacgtgctctacttcttttatgaacacttcttcattaaacttaagcagcttttttgtaacctcaattaaatattgaaatccttcgtcatttcctattaatagttttttcatataagtttttaagtctatagttttaaatttaagattatcataaataaaacctctaatatatttttcatcttcatcatataaagctttatgattagggccatccctattaatatagatacagttacaattttcatatgttgcagctaccagggattctaaattataaaatggctttatgaccttacattcataaaaatctttaagtgtttcattttctcttatatatttaagtccatcaaaaaacttttcaatatttgtttttaatagcacatatgctgctacatctccttttactattgaacttacatcatcatatttaaatttcttaaagtagttcttatcacacaaaaagcatattattaatggcagcaattctttatttgatatttgcttttttatattgaacataaagttcacttcattatgaaagcctattttattacttttcataattttatacagcttagtattatagtttataatttcatcttctaatgtgcgtttattaaaaaacttcctatcattaaaagctgcatcttcaccaattgcttctctaaaaagcctgttaatctcatgcattataactcacctcatttcaaatataatcattaatttattaagtttagctaaaattcatattaataatgttctttacttgtcctttagaaatgaacttgaaataagactagcactttataattacttgaacaattaatttcagttccaatttccttcgctaaaattggaatccaaatggatttactttattcttccagaaaagtagactaaacacatcagctagccatcaactaaaacaatcacaaatatttcgaagaggtgaataataatggaaactaaaactaacgctttaaaaaaagatttatttgctcctataactttaaactcgccagtcaactttcctgatgaattaaagaaatttactcctatttattttgttttaggaataatcttcgcccttggatgtggagatggtcttacttacccaataggctttattcttggagccggtggaggttttgtaattgtaaatataatttcctcctttaaagttgatactttaagaaaaaagttatttgtattagaaaagaatttaactaaagaagaattagcaaatttaattactttacctttaggtaaacttaatatgacagttgaaattttatctgatggcttaagagttacccataataatattgaatatgatgtatttctatttactgatgaaaatgtatttagaatatggccacaaaaatcaatactttcacgatttttagctggaagggtttatattaaccccgcattcagcacatgtattaatggaaaatattgtttctaaacataaaagttaaagaatgatattattattttatccaatattgaaagggtgttgaaattggatattaatgatatgcagatattttccgaagggcacctgcctatcgtgtcgggtgtttatgatcaattaaaaattggtaagaaaatagatgaggtagtaagctgggataaagaaaaatgtaaattgtcgccaggtgaagcagtaaaagctttaattcttaatattttaagtggttatgatccattgtacatgatatcagaattttataaagataaagatgtagaaaaactcgtaggcgaaagcattaattacactgaaattaacgaatttgccataggaagaaacttagacaaaatctatgattcagatgctaaaaaagtatattcgcatgtagtcttaacagcattaaaactagaaaacatagacgttaaagctatccactgggatacaacatctaaaagtttttcaggtgattacgaacgcgtaattccagaagtacaggatgataaaaaatatccaattaatattacatttgggcatagcaaagattacagaagagatttaaaacaaatgaagtttggagttggaactaccaaagataaacttccattattctgtgatgtgttaagcggaaatgaagatgataaaaagtggaatggcaatgtaattaaaagaattgaggaagaactttcaagtgttgatttatctaatattcttcacgttgccgatagtgcattagttaccaccgataatcttaaagaaattaatgatgagacatacaagtttatctcaagattaccgggtactttcagtctcgaagcgaagcttataaaaaaagctataaggacccctgaaaagtgggaagacttatctactttaggtaagaataaaaaaagagcaagcaaatatagaatacaaagttttaaggatgttattggtgaaaagaaatatcgttttgttgtatgtcattcatctaacctggctgaacaaaatatgaaaactttggaacgcaatatagaaaaagaaaagagtgaaacaaagaaagcatttgataaagctatttcaagagatggttatttctgcgaggcggatgcacagaaagccattcttaaatttgaagataaactaaaactcaagtaccataccctaaaatacacaatgcaggagaatgaacaaataaagaagcgatctggagtaaaaggacgaagaaaaaaagatgaaattccagaaacagaaaaagtatatatttttcagtacgaattaattgaagataaagataagataaatcaacgtaaagaagaaattgggatgtttgttcttataactaatgagttaaatgaggaaaacttaagtaacaaagaattgcttatggaatataaagatcaaaactctgttgaatcaacatttaagatattaaaatcaccaagttatgtagatgctatatttttaaataagccagaaagaatagaagctttcggctatgttatggttctagcagtattgctaatgaacttaatagaaaggcgaatttgtgaaaaattaaaactagagtctgaagaaataaatcttcttggtagaagaaaaacattttcgcctacggcaacggcattattcaaagtttttgaaaaagttaaagttgtagcaattcctttaggagcaggaattcaaagaattattcccggaggattagataaaaatcaaaaacggattttaaaattatgcggactaggtgaagaaatatatctagaaatcttttccaaaaacaaagatgtataatgggtaagggcattttgccctttgactgtaaaaattttaaagttataaaaatagatgacaatatttagaatacttgtccaatatttttggaaatatattcactaaaattgaattagcacatcataaatgctcaaatggaaagtttggcaatttatgatatgctgaatgcgggattaacttatacaaaaaagcaatatttacaatgcctataattgcttacaccattcaaactgagataaaaaattattcagctgaaaactttactaacaactatgaagatcttgtttcttctgtactgaatagtacaagccagaattcttatttaaataacaaaaagaaatttattacttttggaggaatcattgctgctattgttgttcttttattattagttgttccaggagaatcaaatcaatatatcaaagttgttaaaaatggtactttaaattcttataactcaattactgttgggaaagcttttgaagatttttttactgatacagactggaaatacttctcttctgataaaagggaaaacatagttgaatttactggaacttatcatataaatgataaaaaatataaaacccttattcaatttactgttaataaggataagtcagaatttcaaatgaattactgtgaagttaatggaaggtcgcaaaatttatttgagtggtcatctctgttatccaatatatatgatgtgcaataaaaggaggaatttataatggtttttatattagcaataatacttacaataataatttttaatatttatcacaagatttttaatattacatatttcggtttatccgctttcttcaaagaaatatttgtaatgtttattatttcattttttctttgttcgtctctattcataaagtaataataaaacttaatctaatattaaaaattttctaataatataaaattacctctatagtttactttgtaactattgatgttcatttttacatttttatttctatgtttttatataatattttttataatagcatacttttactgtatagaaactttaacaagcaaaatttcatgtaatttacttattaaaatcattactttaagaaaaatcctctataatcacgaaatttcaaataagtgtttgcgtcctcttacatataattccgtacacaaatgaaaaatgcctttgtatatctaaactatggaagtaaataaacaataaattataacttttagaaggagaatctatcatgaaaaataatgaacttaaaatcgctgatgtaactaaagaagatattgatgactttaataatgctgtagagtatgtatatgtagcacatgataatttactaaaaaagctctttggttttgttcctgaaaatcctagtgattattttgttgaacgtaaaacatatgctaaggcaatgaaagaagtgcaagaggaattccatttagaagaaggtaatccaagattggtcttgtttatattagaacaacttagccgctcacctagatttattgattctcctaaaaaactttgaaaaagaaaagaggtcaaatctaatgtatacttgtaatcattacaaaaatagatttagaaataaatcttttatttgagatgataactaaagagtattcttaaaatattcttttatcagtttagttttaaaataattatgctctaaccggcacataaatttatatgagaaattcagctctaataaaaaatctctcttttatttaaatctaaatgaagaacacacattttactgaataatactttcaaaataatgtgtgttcttgatttttttattaagttatacattagtgcatttgattttatctattttttgaacttagcggattattattttccaaaactaaaaaacagcattaaacttttgaattatagtaatttcacatttttcttttattaaattgcctatattgcataattttaattatttatcaaattctttttttattatacttctcatttcttcaataaacttttctatatcttcatcattatcatatttttttattttatcaataacttctttagcatttcttttatctcttaatgatatatatatatcaaacatcacactgtaaataaatattttttcatttattccctctttagaatcatccaataactctaataatatttcaaaatattttattgtattttttctatcacctatgtaatcataacaacttattaagtcacgcaatgcttctaacttattttccccatcttcaattgattttttaatcaaaggtattgatttatcaaaacagttcatggaaaataaacttttagcaacaccaaaaacaacttcaggtgtttctttaatattccttgcagtattaaagaattttaaagcttcccaataagaaccattatcgcagtttttaattccctcatcatataaactttgataatcatctactttatagtctccttctattaccttgttaagaatctcatcagtacatactgaattagcaaattcgccattgtagttatctatatattcaataacctttggaattaaaaccgtttttgcaaaagatgaatcagcataccacacattagatcttcccattccagtgccttttcctgtttgtgatgctctctgaattggaaaagttctttgttcctctggcaataggtaacaatcatcccttgatgcctctattctataatacaaatcgaattttgaattagtaaaggcttgtacaaattgttcatctctataaactgtagcatttttgtaccaccctacaattcttgtttcatttgtatcattagttgcaacccaaattacaagaacatcctttaaaaaatcttgatgtttttttgcttctttaaaatgtagttctaaattcatatttccatttagcatgacaaatccataacatttgccattgtagtctaaaaaattataacattcattaccatattcattttcatctacataagaaccaccatttttgggcttgtcatcttcattaacgccttcatagtatttcatccaagctgtattacaaaataaaacattcatattgttttcctcctacatttctaatttatagtttccaattttataatccaagaacctattatgttcagtataatttggatatttatgttcctgtgcataaaaggcattatcatgtttccagtaatccctatgaagaagttcatgataaattacaaatttcacaacttctttatcaacttgtgcagaatcaagcaatttgttaatacgaataatacctccaataaagtatttgccatagaaaccactataaggcttgtctgtccactccacactctctatcccttcatattccccaccaaacatttcatttataacctcattgactaattcatttaggttatatgttggctcgattttatatggcaataattcaactgctatttctgtaattgtagtattgcttggtatacgcccaccttgatattttatacagtcaattattctgctataatagttttcaaaatctccataaatatttttaatcatatcctcattagcatcaaatatctcttgcgttttatcctctaagtcaccaattccaatattctgttctttaaattgaagagctattattgttggatcaatattattaagattttcaaaactaaacataagtggctcagtatcattaacaattaagttatctataaacaaatccacatctgttttactaggtggcatttcaaaacctggaaagtatttatttataatgtcctctaatatggcattttcatccacttctatttcttttctatctttaattatattttcaaaaccttttatctgctccttccatacaaacattgtataatcattaccctcttcatcaaaaagtgaataccaacctgctggaagtgcaagagtacttgttaatgcattatcacctttaaaataaatacttttataaatatctccaattaacccccaaggtatagtaattttttttactggctcatacttaataatttcatcatatggagctttaacatctcctattaaccactttggatttaaccatttattaaaggtatcccatttatcacaaaaatccacaattgttacagtttcagtccccccagcatgtttacctctcattccacgtcctatcatctgcataagcagaccttcactttgagtcggacgagtcaaaaatactgtctggatatcaggtacatcactaccttcagtcaatatatttatatttattagtacatcaagctcattttctttaaatcgccttattttagtttcattatccttattcccagaatatatgtaatcacattttatatttcttttttgtaattctttgcacaaggtatagcaatgaaaagcatttaaagcaaaaataattgttttaccatatatttctttattcttcatataagtatcaataatagccttgtttctttttgttgagtgtgcaattttatttgccaaagttgctggaatttcaccatatttttttattaactttgcttcatctatactaattattgtttcaaaatctgtatttgtttcaatactttcaaagctgggatttgcaagaatttgttttgtaatcagttcactcataggtatatcaaaaataacattattatcaaaaagttttagtaaatatttgctttcgctatctgttcctcttataggtgtagctgtaagtcctaacagttttgcatctttacgaattccccttatataatcaatagttttacgatatgacatagctaccgcatgatgcgcttcatccacgacaattataacttttttagcaagcatagtttttaagtaatcaagacttctacaaacagactgtacgctcattatcataatagtatcatctttttcagtagcttttattgttgaatgttcaccagatacacaagctacttttaagatttttgccttaggatctaacattttaacaagaggtgcaaagttataaaaagcatccgctgtttgatctattaacatatggcgatgtgctaaccatattacttgataacctttgcttatcatatttttaagcagaaaatatgtagcagttcttgtttttccacttcctgtcggcataataagcatcccacttttattaccattggttattaaactatcatttaatttttgaactgcttgtttttggaaatcatataaaggaaaatcgttagcaatgcttttagtcaaatcaattgttattggttgtgcaaatcttgatttttcatcgtattcatactctccactacctatttcgcatagtgctgaaatatacgcacctatcaatgtagcaccaaggttcattttagatagttcatttaactcgctacgataatttgttgatttatatcttgtttggttcttatagatttttgcaacaacttcaggttgcttaattagcaatttagattcaatttcagtgcgataagtaattacaaattcttttgttggatatggagctattttctccatatttggtattaacatatctttttcatctgttttacgtgatggttttaattcctttttagttttatcactataaataatgctgcttataaattcttcatcaaagttgttccaagtgaacttattcatgcaatcaactcctttgctttattctgtaatttaattatacagcttggaaatcttaataagagggataacttatccccttttttacctttccctatctaagttaattccagtatattcttttaattcattcaaaaagaagtcaatgtcatccttggtttttaaagcattatatacaatataatcaaaatcattagtcatattaagctctcctgaacattctctaaaaagtgaattagcaacttcaatttctagttttaatccaacagtgaacttagctaaaaaattgcgagttattttatactttccattaatagcttttttaaatgtatcctttggaatttgacataatatctcaataaaatcagaatcagaaatctttgttttattttgaattctgtattcatctgctttttgccacataatttctcttatcttctcccttaaatctgatgaattagaattattaggcacccatccattaggtactctatttaatcctttttccattctctctatcacgactccgtgagttttaaatgtttgattttcaaattcttttttattaatcatatgttttaactcccttgtgaaaatagtttttgtcgttaatacctctattcatctataaattatctaaatgcattttgttatacatatctaatattacgaataaatacacattagaacaaaaatataatagatcctcagatttacttaagctattatgtaataaggatagactatttttcccaaattatctatcattattatattacaatattctaacttattacccgcatttatctagtgtaataatgacttatttatctataatgatatttttattttacagcaaggtttacttactatttatatatttcattacaatatttaatctattgtttagcattggttttatataagattcgttattattaattaataaattacctatctttaagccatgtaaatctattaaagattttttcttctatattatctacatttatatccgttaattcttcagtatatgatactgccctttttataccccagtaataattatctgctactgattcctttccttttttaggtgtccatatttcataatcatcaatctctttacaatcaaattcatctgtattccttactggccaataaaatcgtgaatgatttgctggggaacatccattactccaattttctatatttttatattcaaattttgagatatacacctttggagtgtcatcataatcaaaatctatatctaacacgtatattggtccattacgccattcattttcaagtttctcatcgtctttactctgaaacagcaatataaaatcattaattaaccaaccatcaacttcaacatcagatttccaccttaaaaactttggaactgaagcaacatattcttttccttcatctgctattgttttacaataattcatcattttatttatgttctcataagttttatttactaccttaaatgcattccttatattttcagctgaattcataatataaatctccctctacatcttcattaatatcaaatgatatactacttttttttacaacaccaaagttataccatttatcttctacatcatcttcaagtataaaatttttaaagctttcaaatcctttcttaattaatagatcttttaaatcacttactataactttctcataaatattgtctatttttaaactttcaagcccatccaaaatgctttgccatgaaatataagcaagttccacatctttttcaattatctttctagttttaatcttttcatagacatctctacaatctctttcttttgctacaaatataagtatcttatttttattaatacctaatcgtgaaataattcgtgattcacgcgaaagctggtttatactcctttcatagacctccaaagtgcttgtctcatctgaatatatatcattattattcacatcatcatcagatgaaattccactaagatatttcacttcaataccaactatagtgtcttgaaaatttattaaaatatctatttcaccttcttcatcataaggccaaaatttaataaattgactccattcttcttcattgatattttcaatagtatttgctaagtcccttggatatatcccttgcatgaaaatttgttttaagcctttattgaatgacatatatcttaatgtaccaaaaacatttcctgtcaaattatcttctaatctatcattaagatttgatcctgaactgcttattttaccctttatttctgcaatcatacattcacttcttttcatatatttttatataaatggatttttaaaattaatatttttaaaatattcactatcccccccatcaggtatgccattatggtctaaatcaagaaatgaatcatgcgcatcagggactccattatgatctaaatccataaaagaatcagcatgagaaatatgattattgaaatcaggaataccatcatggtgaaaataaaaattccaaattgacattttttatcgactcctagtcttacaaatcatttaaatattttttagtctttccaattaaattatttagtttccccatttgttctttaccaatagtttcaattatactaacttcatcaattgcacatcctaaataaacttgtctatcttttttttgaatcttatctctcaaatagctgtatctctcgactttattagctatatcttcagattcttctagcataacaagctgtgataaaatatcatatccatataacaaattattagctattgcaatttctgctgccttcttactatttttatattgcccaatttctagatataccctagctaaagttatgaatggcagtttatagcttcatttgtatatttttttgccatctttccggcttctatagtagatgccttaagcatatcaaataaccccatataatttttctcctttatcccgtagttaaaagtactaatgtttctatttattttcttaataatatgcataaatatagtttacttttttaattttcagttcatcaaaatataatgcgattattatcttttcttcctatatatctctttttatttcatctcttactttcattaatatttttcccaacttgttgctaccaattccattaactgtaccccattctgtatctccatgcaaagctccttgctctaggtacgcatttccagtgcttatcaacttagttgctaattcttgattctgattaaatttgcacatacaaacattgaacataacatcttctttaatcttttcccaatcattccttaatgaaattgatcttccctttgccttagcctgcttagctgataaacttgaaaagctttttcttatctcaatatcatttgatttcatagattgaaaagcagcttctgcattatcaaaaataatccctttataattcaattttgattgataataagaactcaagaaaacatactctcctctaaattcacttatcttttcttttgttccaaaagattcattaaatttatctatacattttagaatatcatcttcactaacttcttcatcatcaacaatattaataaaatcatctacatctataacatcatcataactttctataattacagttttattattcttatcataattgatagtagctattttatccgacgcatattttataatttcctctatagctttcttactgccttttacaatagttggtgtgcattccattaatatttgtatgctaatatctacaagctgctctttaacttttttattcattatttcatcctccttaaatttaagtaatatttcttctacattaaaataacttctatagtttaaccttagtacttcttttttcttaaaaataatataagaataatttatctttttgtccaaaaataacctattttcattatactacaaagttttattattttatctatatttttctcactaatattccattatttcgtgcaaacttacgttctattttttcgtcaaaatactttacataagcttacgtacgtaatataataaaatgatatataaatacgtacgtaggaggaatattgtgaagaataatttcttttatacattccctgcaattaaagggaaacaggctactagggacttttttgttataatgtgtcctctagcaattttaccaaagttatttttatttaacgaagatgagcttccccctgagcatcgtgctcaaaggattcttaataaagcacgtatacctgaaatagcatcatacataattaacaatccaaaggattatgttttttcttcggtgactgcatcaatagatggagtttttgaattctctcctcttaatgagaattttgatgaaaagataggtgttcttaaagtttctatggatagccgtttgcttataaatgatggtcaacatagacgcgctgctattgaagaagcattaaaggcatcaccagaacttgctgatgaaacaatatctgttgttttatttattgatgaagggctaaatagaagtcaacaaatatttgcagacctaaacaagcatgctgtaaatgtatctaagtcaattggaatattatacgattctagagatccaatagctatgatcactaagtctttacttgaaaaaaataagaatttaaataactttactgataaagaaaatccttctttatctaaattttcatcaaagctcttcactttaagcagcataaataaaactaataaaaagctactaaataaattaaatgctaatgatcctaaagcatctgattttgtaattgagttttgggatgtattatgcgaaaacatgaaagaatggcaatttgtattcaataaggatactaacccacaccactttaggagtgattatatacattccaatgctgttgttcttgaagctttaggtttagtagcaaattacttatataaaaacaagcctaatgattggaaagaaattcttgctaacgtaaaaaatatagattggcatagaactaaccttgaagattggcagcatagagtaataggaccaaatgggcgaattgttaaaagtgttacttatgttagacttacaagtaacttgataaaaacaaaacttggtctttctttaacaaaggaagaacttaaactagaaaaagactgtaaaaaggaaggctgattatgaatatagaattacaaaacacagtaaatgatattcttgaggaaatgaaaagggtatataaaaatgataaaagaccttgggttataggttatagcgggggtaaagatagtactaccgttgttcaattagcatttttaatgctacaaagtttaactcctgaagaaaggcataaagacatttatgttgtttcatcggatacattaattgaaaatcctgttgttcttggttacttaaatgtaaattctcaacttattaatgatggtgcagcaaaacaaggtcttccattatatactcacatggttcatccagattacaacaatactttttggactaatgtaataggcaaaggcttacctactccaacttctataaggtttagatggtgtactgagcgtcttaaaataaaaccatctaattcatttattgaagaaaaagtaaaagaaaatggtgaagttgttgtattacttggagttagaaaagctgagagtatagcaagaagtataagaattaaaaatagagaaattgaaggttatctattaacaccacatggcactcttcaaaacacttatgtttataatccaattgtagaattaactacagataatgtttgggatatattacttagtaataatggaaataccccttggggcacaagcaataatgatttgttcaaattatatatgggggcagatggtggtgaatgtccatttactgttaccaatgataaagaaactccttcttgtggtaattcaagattcgggtgttggatttgcacagttgtaaatgaagataagtctttaactggatttattgaaaatggtgaatcttggcttcagcctctactggattttagaaattggattttaagcattcgtaataaacatgaatatagaatgcaatatagaagagatgggaatcactattacaaaaaattatatctagaaaagctgcctctatcggggtattacactttaaatgatgataacatttttgctgacgaaaacggtgagtactatatagatataaaaaattctaaatctgcaattaaagaaggaaaaatactaatctctgctaatagtgataaagtttatctagaacttttaccattaacagataagttacaattagacgagtcaaaaatccaatctgatgacaaaggtgaatacattaatgttcttggatatggaccatttaactttaaagctagaaaattaatcctaagaaagcttttggaaattcaaaagcttataaatgaagaggttgaagaaatagaacttataactaaagaagagcttaaagctatagataaaatatgggatgatgaagaggatttaactcatagatcattagttgatttatattatgatgttattggcgaaagacttccttgggataattataagaaaccaatatttgataataatacattaaatcaaatatcagctttgtgcgaaaaacatgaacttgatgaagatctaattaataagcttttgatagaaacaaacaaatataagcattttaccaataagactatattagataaatcaattaataaaattcttaatcaaagacatttacacaaagcaatagttgaggagatataagaatgataattaacagtattacacttaaaaactttagatcctatgaagatgagactacattctcatttgctcctaacaatgagaaaaacattgttttaattggaggtgaaaatggagctggtaaatcaactttatttgaagcaataaaattatgtatatacggtcctacctcttatggatatttgggacaaaatcataattacttaactaagattaagaacaatataaataacaatgcatttaaaaataaagaagtagattgttttattggtttaaccttatcttttaatgaaggaactgaaataaaaaaatatgatttaaatcggtcatggaaatatgaagctcaaaaagtacatgaaacatttaccgtaaccttagatggaaaagaattaagtgatgaagagaaattatactttgataattatttaaaatctgtaatcccaccatcattatttgatttctttttctttgatggtgaagaattaagtgatttctttactggtaaaaatgcaagctctaatttaaaagaatctgtacttgaactatttaactacgatacttttgaaatattaaaaaaacaattactaagtcatcaaaaagttcaaaccaaatcaaacgaaagattagaagaagccagaaagaaatttgatgatctatccactgattgcaataatattaaagatgaaatcaaagaattagaaaataatttagttttagatgaagaacatcttgataatctattagtaaaaagaggtactacagaagaggattttagaaatagtggtggacttttagaaggtgaaaaagctgctttaaattcagaaatagctaaactagaaaatcaacgtactgaaatttatcaatctataaaggatttctgtaatgatacccttccttttttattagtaactgatattttaaaagaaacaaaagaacaaatagaaaaagaggatacattaaattcctataacagtacaaaagataagctttcaggtagtattttaaaagaagcattattagaacatgaaatatctaataataaatcagatgatgattttaacgaaatggctattacattgctttctaaaatgtttgattcaaagaaaattgaagatgtatcaaatattttagcattatctcttgaagaaaaaaattcaataaactttatcattgataatatattatcaaaagataaaacagaagtcattggcaaatttggcacaacttcgaagatagcatcaaaattaaaattattaagagaaaagttaaacgcgactatttcagaagatatattaaatagttatttggaatcattacactccataaacgaagaaataaataaagttcaaaatactttagctattacaaaagcagctatagaaagaaagtatgatgatttaaaaaataaagaatatcatctaactagagcaaaaaatgagtatactactctacttcaaaatattaatgtttttgatatgtctaatggacttataacttatttagatgaattacttgtaagcttaactagagacaagataacattaatacaagatgaatttgtaaagatattcacaacaataatcagaaaagataattatataaacagtatttttattgatgataatttccactcaactctttatataaacaaagattattttatttctgatgtagtaaacataataaatcatcttggcttagatgccgtaactaaaaaatatggttataaatttattgaagatttacttaaacattataatatagaaactactaaagaattagaagttaaaatgcaaagtgatgtatcttttgactctattagcttaagcacaaaagtaaatataaaagacttttcaaatggagaaaagcaaatttatattctctgcttaatttgggctattataaaaagttccggtgttgaaataccatttataattgatacgccttatgctcgtatagatgaaacccatagaaattcattaactactacttatcttccaaacataagcaaacaggtaataattctttctactaataaagaaatagacagtgaattgtacaaggttatcaggccttatgtatgcgatgaatatttacttttatacaatgataaattaagaaaaactgaaattaaaaatggatattttgagactaactatatgaagtcaatataagttaataaaaaaattatattttttagtcaataaaaaagtgcatgacaaataaagcaatcacattgcttggaaaattaaggaattaaatttgtgaaacaaatgaagtattggtttttaaaagataaaaaataacacgtattagtttttttgctacatggctcatagcaatatagtaatgcttgccttcactttgcttctttgcaagataatccccaaaagtggaatcacgcatagaaacagttctagatgctgttaatatagcccaacgtaagtaggtagaaccacgtttaaccataggtgtatgtgtagcattatattttccggattgatatgttgatggatcaagtcctgaaaaagctaaaagctttgctggatcagtgaatctatctatatctccaatttcagctagaattattgaggctagtgtataagagattccaggaatactcattaaaggagagtctatttctataacaacatcctttatttgcttatctaaagcatcaatttcagcttgaacagatcgaattaacctaataatttgctgaagttcaaaagataaagaacgtgtgctagttccgatagaattgctagctacttcctttatttcaatagcttttgctctactatatttgcctttagtggatttagccagaaggtttgtcaatttagttaaatgacaattggatatttccttcgggctcggtaactccgataggagagcataaacagagacttgatgaatagaccaaacatactttggtaattcgggaaaaattatatctataagtctagtaattgatagtttaagcctagatctataaccaattaagcgatatctatgtctagttagtgactttagctcttgaatttgatatgatacaggtgaataggattttgtatcatcagagaaaagcattttagcaataactagtgcatccattttatcggttttagttttcctaagggtttgagccttacggaaaagatttgtagctaaaggattgagaatggataggtgaaagcctttagcatacaaatagttttggagattagtgctataatgacctgttgattcaagtcctatttttacgttagaaatatccttgttaggtaggacggaaagtattgaagaataaagtaattcaaaaccttcacgtgaattggatatacgtaaagaatcattaataataacaccatctgaatcaataatgcagcaatcgtgtttagctttagctacatcaatgccaatataaatcataagaacaactcctttttaaatttagtccgctatgctccacgtagcttcatgctaaatgtatccttgctctatataaaacgtcatgcgttatctaactaattaacaaataagcataaagctgtggttatatcctcaattgaaatagtctagctataggtgaaaaaactaatccacagcgtcttatgttaagtatagtaaaaattattaagaaaggaaaagtataatgaatttttactacatgttcattatacaaggtgtaaatatgggatttagattaaaaacatcaagaaaaacaaaagaaatatttgaagaaatcgggaaaagttcaaacctcaaaccatttgcattgagtaaaatagctgtttctatgtcgttaaatgaacctgtttctattgaagagtatatcaacaatgatataaatggacttgaactacaaagatctacagttactggagagtttgatgctatatataaagctcttattgaaattaagctaaagaaacatataagcgatgatgaatactacccacattttatgaaactacacatcgatagaggtgctgaacttctatctaataaatataaatacgcaggtggtaatttagagaaattcttaaataacttactaaacaaaggggatgctaatatatgatttatttagataatagctctactacacccattgatcctgaagtactagaagcaatgttgccatatttaaaagaggaatatggcaacccctctagcagatactatacattagctgtaaatgcaaacaatgcagtagaaaaagcaagagaacaggttgcagctttaataaatgctcagccaaaagaaataatatttactggtggtgcttctgagagtaataactttataattaaaggcatcgctgattataaaaaatactacgaagaaagtggtaatcatataattacttctactgttgaacataaatcaatacttcaaacatgtaaattcctaaatggagatgcattctggaataaatcagaaagcacaatagctagtcaatttgtaaaaaagaaaaatactactaaaaagatagatcgtggatatgaagtatcttttcttccagtaaatgaatatgctcaagttaaagaagataactttaaagatgcaataaaagataatactatacttgcttcatttatttggggcaataatgaaattggatctttaaatgatatagaaaaattatgtgctatagctaaggaaaagaagatactcttccactctgatgcaactcaagtattaggtaaaatagatatagatgttaaaaaaattccagtagacttcctttctgtatcagcacataagatatatgggccaaaaggtgttggtgctgcatttataagacaatctggactatctgattttaaaatgacttcattaatacatggaggacttcaggaaagaggatatagagctggaacttctgctgttcataacattgtaggttttggtaaagcttgtgaaattgctaaaagagatatgaataaatatattaagaaaatctccgaacttgaaattgaaactaaaaaaatgcttactgaaagatatcctggagttgaatttttaggagatccagataatcatattcctggtgttattggaatgcttattcctggtattgttaatgatatgtttattaaggatatggctgataagtgtgctatttcttctgggtcggcttgtgggattggggaaccttcttatgttattaaagaaattggagttacagataaaagttctagttttattagacttacattatctaaattttcaaatatggaaaatattaagacagactctttttagactctgtctttttctagcatattttgttactttataaacggtttgacttgtacatataatactccatattaacctaaatctatctaacctttagaaatttataaaaaaattccattaatcacctctaaaaatatacttaaatggtttattgtaaccaattaagtacatttctcacttacaaatatatcaattagtttttaatgcttaacactatatttccagataatttttctcgtctaatccaagcactaattgagtctgtcaaatcaagtaatgttgactccttattcttaacttttttcaaaaatccagctatttcatcatcaaattccatttgtgatagtatctcttccgctcttgcctttgcaatttcataatgagctgtactttcttcattaacaggccatttcgtaaaattattcatgcagtttaatatcttttgtatttcctgtttatcattacttactaatcttaaaattcccaattcttctttaacatctgacaaatagttattagtttgttctatccactctgactcaatgcgctcgcttaatttctttacaatatcatgatattttgcaggattaataactgttttttgttcaaatgtttttttagaataatttatgcacttttgaatatctccaagtacagtatctgaaaattcaacatgattatattttttgcataccgcatagctttttattgttgggattaaatacttattgtaagcatcaaaaaaagtattatttttacgtgcagtattttgattttcctgatcaatttgtttgttctgacttacttctgaaatcaatactctacactcatttagtttttcttgtaacatactaaacctccattaactttagaacttcatcaaaagaagctttttcagattcaaaccttggatccgcatcatcagaccaattgccacttctagtcagagcttctttttctttttgcatctctaaatagaccttttctctgtctgcattaacggattctaataactttatgaattgctttactattttcataggattctgagaatataatattattatatctaacaacgatttttcagataaatccatattaagaatatctaatgctgtaacaatactattactttgttgcttaatattagaagcttcatttgttctcggcataatattaattgcgttaatctcagcctctttataaaattcaattatttcattaagtaaatcttttatatcttctacttctatttcaacatcttctgaaaaaccaaaatactttaatacttctttatagcactcttttccttctttaatttcagcttttacaaccttctcaagtcttaatattatttttttcaagtagtctttagaaacattacgatcttttattttatcaattgtaaattcttcaacatttgtttcaaaacaatccttttttatttctttgaatgttgattctagataagtataattaattatttttttggaagcattttttacattaccttgaatcaaattataatacttttgaatcaattcaatattttcttccgcctttccatttgcatacaatatattatctagcaattcactccattctaacgaatgtccagtgccattcttttttattctctcactttgacttttcaaaagcatttctgtttttatatcagaaagcttactaattttgtaatcaccattaattatacctctatagatttcagctataattgcacaacgaacatattctggacattttgtcttatcatcgtaatccttaactatatcaataaactttgatttgtttttttctaaccagcttgtaacaaatctaatactagaagcagcattattaaagtcccaggattgttttccgatatgcaaccattttccaaaagccagtaataattgatatgtatcatcggaatcctctaagaataccaatcccttatcaatagctctatcctgtctttcaatcgaaatcaaattgtaagcagatttttcaaccatttgtacagaaagtaatgatacaccttctctctgccatgctattgaagcgaaaataaatttacatatttcatctctgactgggtatgctttagtaaagctctttccttcataatgccaatcagataatatccttgcaaaatcatcaaaagccttatttctctcaggtggatttggtttaggtgaatcgattatcggcgtatcaaccggtgaaataattggatcatctattgtttcaagtatattaccatctccaatagatacccccaatattttctcagcgaacttttctaaattaaattctttaaaaatgccaacactaactgtacctatcgaagtattgttatttatgcttaacgttccatctccccaaaaacctatcactgcaaaaacgcgatcgcgataagcatccttctcttcagcattaatttgtatattcgccaaagtacttttaattcttgcttccacatcaaaatttaaacctgcagactttgatttcaaaaatttagggaagtgttgctcgtcctgtaatatattatcagtggctggttcaataatttttctcaaaatatatcttggagtcttatgttgttccaatccattgtataaatttattattgcgttttttgtaaatggatataggcttaaacttttaccattaaaattataactttcccactttttaatatcaggatcaacatgaacaggatattccgattccaatgctccgtctttataccagttatctatttcctcagcactaattgacattacatttaaatactttgccacaaactgaatcaaatcgtctgcattgttaccaatcgaaccatcttcaatagtaatctttgtagttattctatctatataattatctcgaaactccttaaaatactcagtcgttgttcctattactgatacaagtctacacatatggtcagcttcattagttccagtatgttcaactataagtgcatttagcaagtcttgattaattccagtacaagaggtaatatcctctattaataagaatagattctttccttggcgaaataattcctgccttatttccttaaatatttgttgaaaatcacctggttctatccctgcacaagatctaataacttgttcgactttagaattcatgtaacttgttactatttcgggattacattcatcatcttcataactaccatatgtttctggcaacaatttatttgccatcttcaccgctttcttactagcattattctttaatttaatattaaaatcataatccattgtaaaatcatttacatcaaataaagctagtgtatcttcattacttccagaatcactatctacaattttgctgtaaattctttcaattggtccaccagccattaacattcgctcttcaaattctgaacttgataataattctttgaaattttttctatcatttgatgaaagaatcgattcctcatcatcagctatctccacaaggaacttatgatatatttcatacttaaatctttgttcgcctacattctgatttgccctaacaagtctttcgtatacgtctttattttttatatttttgacttcttctatatccaaaaactgctttattgtgccctttaatgtattatcacttcttcttatcataaggacaacatctttttgttcttcctgagcatttaatttagcagaaatccatcttataaaatgtgattttcctgaaccactagaaccatcaacaacaattagctgatgtctattatatatatctgaattactaaaatatttgctaaagatttgttcttcagaaatatattcagaggtagttatacctgtcaaatcgttggatacagtaatttttcggaatggaacatgtgtagacaagaaatccgcttgtgtgctattaatcgagtcaacatttaatacatcttttaatcttgaacttgcaatctgtctattcatcctcttttaactcctttatatactatatgtgtaatcttatccgtaaactcgtgagtttcatcaggatacaattcccaggtttctttactatccaaagctttttttagtactatttccttcatatcatgcatctgtcttaaagcatttgacatagctaaattaaatctctttgtttctttagcattctccaatacaactgaagcactattgcttatcattgatataaattcagaaatggtatattctttattcttttcaaattctgtaaattcgcaaaagtcctgcaatgcaatatgcatattaggcaagtaatacattgatccactttcctgtataaatccaaatcctaaaaacgaaatccagaaacgcatacctaacatcatttgtcctgtaatcaaaggaatatgtgttttttcctgaacttctcttataatattcaaatccgttaatgtcttatattttaaccatttatcatctgactccataaaacatcttgcaattttgtagaaatccgtctctttatttttaaatacaatcgaattacaatatttgcgaaaagaatccatatctttcaatattttcttatctccaacaaaactcaatacctctccttctttggttataagttttaattcttgaacacatacttcacgtatgctaccataataggaagccgaacctgctgaattaattgctttcggttccattctttctttcacaatcttatcctcgatatcaccttttgaaactattttacataattcatatacacgttccggtattggttctgtcttaatattgttatcaaacatatcttcgctccttaacttttaatatttttgcttacaaggtccattaataacttcagataaattcttatttttaaacgttaaataataatccgtatcagcaactaaaatatattctatttcatatttttttgtattactctcaataatacttattattttctgcataataaaatcatcgtcaggcatatagaacgcaattgatcctgatacaaaatatttatttgatgttgtaagttcaaagaaatccatataattacaatacaacaaactgctattgcaagatatattctcatttattagctgactaataaaaccattatctgctacaataacatcaattccattttctattatttcaacaaaagaagataatctgtctgttttattaataattagcatacatttagagccgtatgaaaaatctttaatttccttacctatacacgccaatggaaaatctatgttcttctttagtgatctgtaatcttcaaaatcaattgtttcaatatgttcattacatcctgcacaatactcatcagttttgcgatatatcttattaaacattgatgaccaacaagatttttctactttctgaagattctttttcataagcataaactcatgttccaaattcttccattcagtgtctctaagttcgtccatcaatttttttgttttacaatcatttataagaagttgtctatcttttatagttatataaaacaggtatttgtcatctaaatactgtatatcatcaatcgaaagcaacccgtttctacgtaagaacaaaataacatacacattccaatttacatcttgattacttatagaatcaataaactcttcactagcattgtaatttggtttaacatatgtatctagcatatatttcccacttaacaacggttgtgttttgaaactatacaacatactaaaccatctaccaattaatttttctgttgtaataaccttgctaacaaaagagaaagccgaatctatatcttgatcaatataaataactgtactcaaacaaggtaacccatctcttccacctctaccagcttcttgataatacttattgggattttccggtatatatgtgtgtaaaacagttcgaacatcttttttatctacacctacaccaaatgcacaagtagcaatcattaagtcaaattcattatttttccatgaatctatcaatttttctctctgatctttatttgtatttccagtaaaagtatgtgcattgttgtacccatattcgcataattgattctttaacttctctgcatcatcaggtgatttaacatagacgatcattggatgcggtaacaatctaattgattcttcaatttttttatatttttcactatatgatgcgcatctgataatatcaaatctcgtttcatgcctcaaacgatcacagcgtatttctatccacttatcttcattagaataaaataattttaattgccgtatagtttcatcgctatatgtagcagaaagtaaaaatgttcttaaatcttgatttgcacataacaatttctttctcatcgcatcaagacattgaaaatcaattctaaaagatgatccccattcaataataatatgtgcttcatcgataatcagatttttcaaatacttttcactatttgccttctctatactttctcttaacttactatttttaatcaagctctcaggtgatacaaataataaacgtgcttttttttcttctaagctcttataaaacttagttaaatcacatccactatagtaataaaacacctcttcttctgttttagaattaattatattctttgcgtttttagcctgatccatcataagcgatatagtaggaactataacaatggataaaccttcgttttgatatgcaatagtctgggtaattaagcttttaccacttcctgttgacatcgacactaaacatgcatatccatttggagtccttaatgcgcccattactgcaagcttctgttcatgacttttgaacatagcaaatcctgttaaattttgaacaaatgaatttgtaaccaaattatgcatattatcaacttctttttcaggaatgtcttgcatatatagtttttttacatgatactcgttcacaaaatttggtagtaataatgttgcccaaatttttcctgaattaatatccatatttaatccaagcttttcaaaattttccgatgattcgtatccgcaaataactatttcttttttcatcaataacaaatagtttcttaatgaactttcaaaatctagcttatacttcttatcaactttttgtttgtcccaacttttcaacaagcgaatcgctgtcgaatatttatattgctctacttcacccatttttgataaatcaatatcaaatatttccttactttttctgttgattgcctgttctacaagcaaatttatatcattatttatcatcaatcaacctcgcataacaaaccgaatccaacactattattggttttgaaaaacacttgaatattaaatcattcaatttagcattttcgatttccacatcttttccataaaattcatatgatgcctttttggcacctgcattttttaacaattcgtttttcaaaagagctaactgttttcttaatttgtcacctatttgctttttaacattttcatttgcttttttatatccataatcaacagtttgcttccatcgttcctttggatacatattcaaaaacaattctatattagaatttaaacctgacctagatcctaaatgttgaaatttttttctattaacattttccgaagtcattaaataattaaatattttcaacacttcttcatctgaatttctatcatcttctcttaatcccactgaacactgaaattgttcaattggcataaaacctctgtatttatcaattacatgtgttgataatccattttccaataaaatagtttcatcaggatataacccccacgtaaaaataaatccagtccagtcaatttctgttttacatgcaaatgctgcacatgttcctttatatgaaccaatagcgttatagactatactgtcaaaaatagcatctccaggtgcaaagaaatatatataatcattctctaatcccaattgtctatcaaatgttccttgtacgtagtttgtatcagcatgtcttaaattttcactattcatcgaacgtactttattttgcaattggtttatcctatcgcttatcatcaacttaatatctggaggaataaacaaagaattatatgcagactttaatgaaaatgatgatgcatcaaaacttattattgatttgcctatgctaataccatgaaaaccagataacgaagaccatcgcatcatagaatctgcaaataggtgtttttcatttaaaacatacagttctcttgtattatccattattctattaattgactggtacttgtattctgcaacatcaaagtatctttctcttgtaataatctgcttcaattcatcaagttctttactcacctcatctataattccaattaaaccatatttaaaatccaaacaaactgccttaataatcttttcatccatatcattcatgatgatttcaagaccgctttgggatttcgtaaataatcctattccctcattccaaaacttaaataaatcttcttccagtgataatcgtgcataacaggccgctgagataacaggtttgtttttatttcttccaatacgatctaatcgaccgattctttgttccaaatcatttgctctccaaggaatatcaatatgcacaacaatatctgcattctgaaagtttcttccttctccaccagactcatctgataacaatatccaatatccgttatctgtttcaaatctataagcacttaattctctttcatcagtatccatattttttgaaaagaaagcacaatgttccttgccaaaataattttcaaatgcctgcttataaattgaaaatgtttcatcaaagctagtaaatactaagacttttttcccatatgcctcttgatcaatataatctaatatgttgttcattcttgaagcataatccgttggatctttcatatattcatttaacttatttaaattttgcagttcctcttctacccacttcttagacaattcatataaatcatttgggatattttcagaattaatgctctttaattcatataaaaaggcagcagctgaactaaagaaagcagcaactaatctcttaaacttgctcaaatacgatttataatccaaatcattttgttcaatccattcagcaagggatgtgtacacattatactcagtattattgaaatttgtctgaagatcatatgatatgttaacaagttgacgttcgttataatcatcttcatcttcagcatttcttctatttcggataattgctttttcaaattgataattttcacatacatatgataatgaactttgtattgcttctattccaaaatcatcagcttcataatttatttcttcacacatttttttgaaagtatcatctttgattaatttttgaattttttcaaggcaatcaatcacatcatcaaaagaatcctctgtattttccgtatgttcattttcactttcttcgatttcatctaaataagaatctaaattttctagtgtagtatgaactcttcgtacaacatcaccctgcaaatctaacaattccataaaagtttcatcaggcatattctcatatttagatggctgaattaactgtaataattttttgtattcaccttttcttctttgcactggagtcgcactaagcatcaaaatattgtctgtttttttacttaactcaagcaaatatttgtacatatataaatcctgtaaatacttatgaacctcatctgcaattacaaaatcataatgtttctgatatatatgcttttctacttcactcataccaaccagacaaattttattgtcgttgatatcatacccttctaatattttaaacttgtatgctaattctgttctccattgttccactagggcatcaggaacaataattaggatattacagttatgatggtcctttaagaacacctttaatactgctgatgcttctattgtctttcccattccaacttcatctgcaatcatatttctgcatacaccatcttgcaaacaacgaataactgtacgtagttggtgagtttttaaatatattttacaacctgcaatctcactaaagccataaagtgaattattaatgatatgcatagttttactaacaacactacgtccaaaaaaccacatcggattttgaaattcataatttttcaattgttctaatggccatacatatccttcattatatgatgtttcaagtgctgattctggaacatactcaatatcatctctgtttgactgaataaaataataaaacattccatcttctttattttttttatacgctttcacaacatatttctctcttttatattttacagtagcaccagttcgaatttttaaatgagaaattttatttatatcatattctttactttctggtttaggataaaacacactaacaccacatatatcaaaaaattctacgtataccaattctgaaaattcattaattgattttacttttccaattgcaaaatcacgtgaaaattcttcaccatccgttgcacaacgtacaaacattccctcttttaacaatcttactcacccccggtgtttgccccatgctctaaacaaatatctttacttgcacaatatatacaatgtttgccatgaatgcaataaaatttcttttcacttatagctgtttttaattcttcgctagatacagcttcctccatgccttttaaagaaatatttaagaaatgctccttcaatcttaattcacgttccaaatcactagtcacaacgggaaaagcatttctatttctgttatactttttcataaaatttataaaaccataaacatccttgtatacagcagaaataatctgagttttttcaagctcatctgaaatacgaaatctattttctataatttcatattgttcctgaattgtatccttaatgctctcatcagaatatggctttccactaagttccttctttgtccagttacttattaatatcttcaaatatgtgtgtatcagaaaacgatctctaaatacagtctttccttgttctattccttctaaagcaaatctatatggacacaacctcaactttttcctgttttcaggacttattttctcaattaattcatccattttttcatcttccgattctataacaagcttttgtaaatagttatttgaattaaatgaagaatatttttttatcttaacgcctaataaagtaagcatatagaacaaatcattatctttgttatcttctgttctaacataactcaatttacaaccaactctattaaattcaagaccatataaaaatgcatatcgtttaaagtttttatattccatttttgattttaagaacacctgatatttccattccaatgcctgataactatattcgaaaaactttatgtcaagaggccatggcaaacgttcatctttattagaacatatatccttatcactcaaacaacaaaaatgataacaagtcttctttgggtcctgttttgaacttcttaaaatatctccatctatttgatcaaaatttctaacaatccaatgtgcaccacgtgctgcattatcgtcttggcttagataataactcattgtttgctttaatgaattaaatgtccctgtttctggaagatctgattgttctaatcttttgagtaatcttccaataacatcatgtatttcatcatccagttcttctatatcaccaactctagaaacaatgaactttctaattctagaataaaatcttctaaaattatcctttccattaccaaaatcctcaaaaaatgagcttacaatacaatttaattccgttaatgccttttttaactcaattagcagttcaatatctacagaaaaatatcctaccttttctttatcttcatgctttttatttgcatttttaattaattgattcaattttttaattatgcctaatatcgtattttctttttcaacatatggttctatcatattaaatgtactaactaattgtcctggattactttcaataataattccagaattcaagcattctttgatatcagaaaaattatctacctttacttcttgtttttcttcatcccacatgtttgttgtagatacaaagaaatgaccaattgggtaatccaaaaaatgtctttcgccaaactgttctggaaaatatgctcttagtatatcatttactttgcccgatgctgaatatagctgctcttccataaaagctaatggtgttttattatcaccatttttttcgctcacattttttgcgcgatcaaataacattgctacgtaatttgcaaattccgtagtgttatcaaattcagtaacctcaatatcgttcaaaaccttatttttttcaataaactcaccacttgacaaatgtccaatataatctgccaatacattagattgatatgaattcaccaagagaggcataggtacaaattgatttacactatggttatttattggtaaatcaaaatttgaatatatattcatccaagtatcatatatggatgaatactgtttctgataattaaatagcaaaataacctctttatatttacttatatcttcgattgcacacaacatagctggtgtaaattgatgaataccatgaatgacaattttatttctttcaattaattctaaatcaacatcttttttgtgatataacaatgccttatcaattgcttgtacaacttgttcaatcgagttaatccgttgaaatgaaaatgaagatttttctttattatcaattatcttatataattctactaaatattgttgatctatattcaaatctttctttgtcataagttttgaattaatgcttagttctttaaacattcttatacatgatacaattgcttttgtattaaataacaatgatctcttaacattgtctaaactcgatgtttcaaaatccaattcactaatcgcattgtcaacctccattatctgacgcacattaacagtaatatcttcccagttttcatacaatgaattaaccaaatttctaatagtggatgtaagttgctttgtcttaaatacaggatacgtttgatttaatccatttaccattgtctgtgatacacaaaaatgagcacaatcttttatttcattccaaaaaggttcacaatctatttcatatggatttgcatatgtataaattttaatcgccatactacatttcctccaacaattttccccaagtatttccattagcatcaatcttattaaaccaataaaacttattgattgctctagttaatgcaacatataatattctagcttcttccatttctatttcacgtatctcatcatctgtataaaaatactcatttgcaaaagattcaccatcgacactaatacagtatcctacttttccatcaacgaatgtaatatctaatccatttctatgcatggtatcgattttatcatttgtaattggcatgataactgtatcatattctagtcccttggacttatgtacagttgtacaaactactttcacataatttccgccatctgtaactgatcttgatgttttttcagaccccatgtttataagaatatgcaaagattcatttatagaatcaagtgttaaaaaactatattgattttcttttgataattcctcaaaaagcaggtcataatttgtcctataatgaatttgttttgcttcatcaaacgagtaggtcttccatggtttagttgcatcgtatatttttcgcaaaatcatcaatactggtttgctttgtatttcatataccaattgactccaacttaaatcaagtacactcttataaaattgatccaaacactcagtcaaatattccattttttctttctcgttcatatcaattagtttttctacaggaaatttaatattaacgttattagaaagcaatagatcaaatagataaactggatttcttggattagttaaagcagctgtcaatttgcacaaatcaatacttgattgcaatctgtataaatccccattggaatcactttcaataagtatattatcttggtttttcgcctttcgaagaattgttgctatctgaaaatttgttcttaccaatattgcaattgttctttccgcctgtgataacttattaaattcatcactttcttctaattcttttttcctatccgatattatctcaaataatttctcataaattacatcttccttttcatcatcctttgtatattgaaaaacctctattaactcattttcttttaatgcaggattttcatttgcaccaaccagcatatctccaggttcatgatatggtattaaatctttttcgcctaaactaataaataaaacagtaaaattgttaagcaatcttttatctgttctataatttatattaagtgtgtattcatcccatgattcagatttacaacccattttattaaatgcatccattgttgcccctctaaatctataaatactctgtttaagatcacctacaataaaaaatttaaactgtagttttttctgcatctcaagaaatgccgaaatttgtgaatcatcaacatcttgaaattcatcaataaaaatatacttgaattgatataaatttgtattgaatgactcgtccttaacacatttattcaaataaagcatgtattcagctaaacttatagtattattttcatacaaatattctgaatatgccttctctgtttttatgattacttcatctattatttctttcatatatcgcatttgactaattggctttccgaacacatctccagaagcttctttaatgtcataccctttgttataaagcatatccgcaaacttcaataacatctttctaaaatcatatatacttccaggaatatttccgaaaaacattggttcttcatcgtttttcttctgtaaatactcattgaaatacatatcaaaaattttctgtttttgataatttccacttacagtcgaaaaatcaattccaatacccaaaggcaatgaagtatcttttattacagaattagagaaactatgtattgtagaaatacgcatattctctacccctgaaatcatctccaaatatttcttatctcgagtgagaacaaaataattcataaatgcttgtttgagtctttttttcatatttgtagcagcttcagttgtaaatgtaagcattgcaatttcattctttacatctaaaatatttgaaccactcgattgatgacatatatatgatattcttgaaatcattgaatatgtttttccagttcccgctcctgctttcactactatatctttattaattggagcatgttcaaccatatattgctgtaaattgaattgggtttttttagaaatcttggcaatcatcgtttttctgtcatcgtcaatcaatccatttttaacatacacatactcattggaaatttccttcaaattctcaacataatgtgcttcaaaattaaaaaatccaatgtatccatttttacttttaatatcatttactttttgtgaatttaaaacaaatttatttttctgcaaatatatgccatctgcgttgaatttcttaacaatattttgagtaagttgttcaatttcttcaattttacttacaaagacaatctgtttctttcctaaaaagtatgattttattatttcatctatatcagatattgttatattttcagggtaaattctcaactctgaatatgctttaagttcatccacattcagttccatcttctcaattgactcaaaatgcagtctacatgtattatatacatctcctactattttatcgtatattggttggtttgatttttgataaacaccagcaatcttcattgcaaattttgttgaatcctctatatcttctttaaacaatgtaaactcaggttctgaaacaatgtttagtcctacttttttataatcatgttctgacatgaatggataacataccatatccattatcaatggatttatattatatttattattatatgtatttactaaggcaaacttataacttctcgattgttttttaggcgaacccactggttcagtgtatagagaagtcattatctgatctggattatcaacactaataatgtcagatgcattccacccttttacttctattattaacatccccatgtgttctattaataaacaaaaatcaaactgttttccatttatttctctattgtagtaacagataatatcatcaggcagattattttcaatgcattcataaaccttcatctcacccttatatgttccgtcctttttatccattatcattgccatattctgtacctctaaactttcaaaatttcaagtagttttagattttctttattgcatattgtattaatcgagtaagatctaaataattattttatttaaaatcctctcacatcaccatatgtttcggtatacgggtggcattaaaatttgatgtatcatttgatatgtttgtattagactaataaattctagatgttttatcacttaatatgtttaatactccaaagtgatatgatcttgcttactttttaggagaacattctggttttgtaccacttataagtataatttcatctacactgaacacctcaaatatacgttccctatcccagccttttacttctatgatcaccaatccagcatcttatcagtaatcaaaaatcaaagtctcttctataatctcatcaggcaagttttgagaaaaagaatcccatactattccttctccttgatacttatttggtctttggtcaatcattaatgccatattgatatccccttaactattattctattatttattaatattttattacttttttgcccactataaccataacttttcataacttagttatatcaaaaaattagaaactatattcatcattaattcaatatgtatttaacttctgtttttttaataaagaaacataaatggaatatattgcaaaggactctattttgatttttacttattttagttacatttattattcttttaccaattcccaaaaagccctatccttcataaacaaagccctgtcactatctcccatcttaaccaagctataatgcttattcaaactttttatcttactaaacaagctatcatcttcttgtttactttgagtattaaatatatatctaacatccttattactaagatctgctacattatgaattacccaagttaaaatataattagcatattcattttcaccagttgagaaatggcttaataattgggttgatagaattgttcctactccaaattctcttccttctttaagtattttctttaatgaagaaaagttcttgcttaaaaagttatctgcttcatcaactaatacaatcttgtttaattgtcttaactgtccatcaatttcactatggccatatgcttgcatttgtgagtagaataaatctaatgttattgctactaccagattctgtattcctggatcatatcctgataaatctattactgtgacaccatctattaaatcaaatagactcttagtttcatttggatctggttcgaatatttcaaaatctattaaattactaaatgctgcatataagctatcttctttcaaatcttccttaccaacatatatatcatatacatctttaagcgttggagctggcttgtcccatgtttctgaatcatttttaattatgcctcttctttcataggcttccattattaaatctctaagtaatgtttcttgctttattccaagtccaaaagcttttgctaatgtttcttttaatccatttgctgtatgaagtggtaacattggttttgaatttactgctttcacaactgataatggattaaaaggtaaatggtataattcaaatacttttgcagcagttgcatctataaagtcttgttttgacttattataatcccctttataatcaaagattaatattccaacttttttaccatcaacattatattttgattctttataaatttgagtaaccattgatttagtaaattgggttttaccagttcccattgttccaattattcctgtgttagtatgcatcattttatttgtatcattaggacaccagtaaatttctctgttgttcttttgatttactcctaacagtattctcatatctctatctgaaccatactctttttcagaagatgtttccgctatattttgtgctttctctttataatttacaggattatcagactcctcagttgatgatcccaattctcctgttaatttagttttttcaggaatattactatcattagaagcttcaatctctttattacctacttctttattttttacttgttctttattgtcttctttttcagcagcttcatctgaattgctattataatcattttcaatactattagttatttcatctgaaactatattactttcaaaatcaatagccccaactaattctcttatttcactaacagttttagttacaaaattaaagccatcttcttcattcattgcaataaccataatattatcttcttttctaatacttgcagattcctctttgttacctgacttaaatgaaataacacaggcaattccaagagaatcttctgttccattgcttataatatattcttcattaagcaattttcttcttaaatcctcatctattacactattccaattcatttcctcacatacattgtaaaggttaagtttttcagcacttattattacgagctgcattaaaaagtttctgtatactttttgtgttaccgtaagctcttgtccttctttagctaatagtacttctgtgaatattttctttgttgcctttgcttgagtaattcccttggttaattcatcactttccttataacctatcttaacttctatcggataataatgtacataaaccttattattaacttcttcaataccaattaaaagaatatcatcacttgtagctccgctattatcaaaccccagcttcttagctgataagaagccctcactttgtttaagtccagctcccccagataccctaagtacttcttcaagtgaaattggtacccatataaaattatccttcttaaactttgcaattgctagttttatagctgacagaatacttagcttttcttttggaaaatgtgaattactagatataagtcttaatagccaatccccatttatggcattaaacatattaattattcctgccgaatgcttttcaacattttctattccctttttatttagaaattcttcaataactttttgatatggacctgattttcttgttacagttatagcatcatatccacctgcagttgtatactgatcgctataatgaataataagtaaatcttttgcacccggatcatttttaaagaaatttagatctactttcggatctataaaagtaacccaatggcttgaattatatacatcttctagtgtaagcctattactatttggtacagatataacctgacttatgttcttattaaaaggtgctcctgtacttgccgcattaacagcatttaaccttgtcgcaatcttaatcaaatctgaatctgtattagcaaatttagtaccaaaacctgttttataatactcacctaaaaataccgatggcaccccagaaataagtccattaagaattattccactaggtatatcatccatattagcagtatttttcgctatttcgttattcatttcaataaatgtaatatgtgcatattctattccgttttctactttctttgaataaaagtgtactttttcccgatacaaatcaagaatatcttcctctgacattgaagccacatttaagtttaatccatatattacttttaaatctttaatatcatcattaaaagcaacctcttcaaatgcattagttatatttttatttgaataaatataaatatccattggaagtatttcagttttagcatcctttaactcattaagataatatttaaagatcccttgaagaatttctttgctatcccctgtatttataagattgatcttaataggcgcattgtttcctatattaaataaatattcaaagtggtctacaaattcatcaattttttcatacaccaccttagatacaaaatctcttgaacttttatatcttggaagcttttcattaacatagtatttccactctggagaatgattctgctctacgggtatatataatcttttttcatcaacagtaatatatggcattaaataacttgaactaaatttctttaagatatcctcttccaaagtttcatttcctatctcattatataaatgaagctgatatgctatatttaatggatgaagaggagttaataacatttctttatcttctatttctctttttattacaccaatcttaaataaattattatgttctctagttagttctttaccttctggtatttcatttaacttttctttatatattgaaataaatttataatacaatccttttaattcatcatttaaataagcaagactaggaagtttatgtgtattatcaaaatatcttaatatatcaaaatatgcttcctttatgtcctgatctatttctaactcttcaatttcaaggccttctccataatctataaaactcattccgttcatttcaattatctttttttcaagttgaaggttttttctaaattcatcccttgtaaagtagtcttttgttccaaattgaagtttattctcacctatttgtttaaaatcacatttcttttctcttttaagtttccatactgatggtccttctattacaactgttttttcagttgttccaactatttcaaatgggattatacagttatttatgtcgcctttaaatgttacaatgtcactgtcattttcatattcaaaatcttctccgatttttacagttaaattattttcttcagttatattaacagtttcataattatcagctaacttatgctctaaagaaattgctgcaaattcattaaaaaccacagaagaattatttgtattaatacgtataaagctatttttcttaccataatttatagaaaaattagtttttatactttctaaatacttctcattaaagcatacaactactattctaaactcaaattttatctttttatcatttgtatatgtaattctatagaaatttgcatttccatcacagtttaaaagtttagctcttattttctttccacttgttaatgcttctaattctccctcatgttttaaaccttctttagaaacaaaaccatcaaaagaaaattctagttctatttcttctttcttttcttcgttaaatataatcatatttctaagtcttgattttgcttttgaagtaccttcttctctatcccaatcaactgtacttcctataaattcaagtggaggtgtttttattttatcttcaatatatttcttaacatacttaaaatcagttgttttccaatcaggcttttttagttcattcacacctttatcatcataatatttgtcaagctgagtttcaggattaccataattatgaatttcatccactcgattaaaatttaatgcattctcctttaaccgatctgttaactttttaccagaactatccttaagctcgctatcataaaataatccaaaatttttatactcttctatctgaatacatttttcatttataattgcaagtagatctctatattcaaaaatagaaatactatcccctatcaattcttttcttttacgatctaaatccatgttgataatggctttatctacttctgaaaaattatttgtagccattttagcttgtatatctttttgaattgaattaatatgaaatggcatcccttctttaacaaaagattctgttccccccataatactatctaatgtagtatcatgaataaaaagtattgcattatccttatattctttctgaactccaacaatatttctaagtcttgttaaaaagtctggttgcacatctcctattgttgcagcaacaattaatttaacatcattaaatcttattgcataagaattatatgtgacttccttgtcattaattttgaccttatactcaaattcttcacataaattgttattatgtcttaaagcatcatataaatcctgtacctgttccttcttttcaaattgaatattatattttgcacctttacttaaaggattgctaatgaaaaattccattactttttctgataaataattataaaactgatttaacatattgtgcatccccgctatctgacttcttttctaataaatttaacttttcatataactgaacaatttttgtttttgaatctctgtcaaaccaaattccacgcttctcaaattcttcaaataacacactaacttttaattttaggtttttattaatacatatctttgtaagaagtataatatcttcttcagttaaatttaaattatatccaagagaacctcgtgctttaccaaaattcttttcaataaattttacaacccaattcttgtaattattgtaaaggtcatttctatttcctttagactttatgaattgaaaatttatggcatcataaagtttgtaaatcatatcaaatatttcattgctgcatgttctttcattttctttttcttcttcccactttatatcacatatacgatttttatattcttctattaaatttttaatgtcatcttttatatttgtattactatccgctttagttaattcaaatatttctacataccctagttgcttattcaaattatgataatttagcatttctaatgtgattgcatgagaatatagagcacttatagatttctttatcttttcaaatccgaatctataagcagttctatttttagaagtactttcccagtttaatgtataatataacggatctgggttgtttaaatcagctttttcaaactggctaagtttcattgaaagctgtgatatataaaacatattataatattctaaaaatctctgaattgaatttttatatagttcttcattactcattaaaaacataaaatcttttttaaataattctttaatgaatggtatatagcacttatactctttgattttaatttcactatcttccaaatcaggtaatgcattcaaaactaatctttttaaaatgttattagtttctttattataaagtttgttaattaatatttttaattcatcatccataaataatgaaaataagaattcagcaatactttcctcataagttgatgcttcaatataattgattgtttttatatcaaaatctattagtttgtcattattaataaacattgtctgtattatatttctaaaacttttccgagtatcctcatcttcaaattctcctatttcttctgttacattatcaataaactcttctacaacaaaagtacttttaagttttttattatgcaccattctaaagaatgctccgataactccattaaaaagcaaaacaatgttttccttcttagtcgtataaggtaatatttttattttatcgcaatgcttatgttttaagttgtatgccccttgaactatttcatcttcaggtttaaatttaaaatccttttttatctctactaaatttaatttataaattctattatcttccatattatatctccataaatctatatgttccaaactcatcatcaaattcaagcttatatttcttgttgttttctctgttcttttcaatgaatacaagttccttattctgcgaacctgtatcttcaagcttgcctataaattcaataaatttaatgaaatgatttctatcctttttgtttggtctatatccgttatttatttgaactagtagcttatacaaactataatctatatctatatcataagattcttgagttttttcatccttatattgaagttttaatgttccaataaactttttaatatcaacatcatcattcttaggcaaatttcttgtatcagcttttaattcaactttttcacttactttatatttagtctgattttttccaataaatatattcaaatattctttttctgcttcaccattccacttcataattccatttttaacattttcatatacattctttagcttaagcttatcccctctgttgtaataaaataaagcattcatatattcatcataaatagaatctctaagggaaaacagctcttctattccgcagatataataacttcttataaatagctttaacaattcataatgtatatcctttttcttctcagtattattaatattagtatttattattttccataagaagtcttcgggaaaatcaatatacttattaaaatattgcattatgtcactgtcattattaaaatcaataataaactcatctaacttttcatttcgtatattcaaaggatcaatactgcttaatgcttcaaatataaaagataattccttatgattaaaaataatattcggcattaaagaattcacatattctatactattaagcttagcaattttatttttaaatgtagctgaatttacatcaatataagatcttggaataataagttcatatatgaagtttaataaagctctcgttgaaattattattttatttttaactacacattgtacaagtaaatcaataattgatttctgaacattatcttttgataaaagttcataatttgctttaattgggcagcaattattattttcacaattaatacaatactgcttatatgaaagataaaagtaatttttctcagaagactttgttattctttgtattattgatttaatatactctgaataaacttctccattatttaatgtaaataaatgataatcactaaaatttataaactgaaaactccttttatcatcaaagctactatcttcaatagcactttctaaaatcttcttttctactacaaattgttttaacttagtaaatctttctccatacttattagaatctataaaattatttaaagttcccaaattgattgctaatatgatttttttattactattttctattttctcatcgctaaaatcatctaaaacatcatttaatgtatccattgatgttttattaggttccaagctttcagtggcatcattatgaagtataaaattattcataatttcagggtacttgtcattgaaataagaaattatatgggatttaccatcaccaacactaccacataccaaaataagctgagccttgtctgattcatttgctttatgtattaattcatcaagtcccttttgtgcatctctttctatatgcatatattttttaaaatttgtaaaattaccaatactttctactgcttcttttgatgattccttcaattttgataattcctgcacaagacattttttatctggttctgttaaattcactatactttcaaccattaatcctgtaagtgcatcatctctcgcttcttcattttctaataaagttgacgctgtttcaaaattattctcttcaaaattttctatagtttttttaattatttcttcaattacttctttatcaattggataagtcttttctgatgaaggcataagacttttataaggtaaagcttcgaaatcaaaatcaacataagctttaacaaaccaacatgttattttataaatattcatatgaatatttaaggctgtctcaagttctccttgaaagtctaaatgaactgctttatttccttgcaatctaactacatgaaataatttttcgatactttcactaaaaataccttcatcttctaaccttcttaacctttcagcctgtgtcttatcactcaacaatccatatccctttaatttagctatttcttgtgtcagattttctacaaaacttcttcccttgattattgatgtattgggagatacaaataatgcttcgttcatatctcttatgtaattatttaaatatctatagtttttctccaaataactgaaaacatccttttccaattctgaatcttcctttccgctaatctggtcttatgtacagtatcctatactcaaaatgttatatcaaaaacattataaatttccatatctcttaaatgtacctattatataatttcttttgatctaatgaaattccattttctaaagccacaaaactcttctgcattataataatttattaatctatcttttctatataccttaaaatcttttacaatcaacagctcttgtttcaaagccaaattttcatctctatatattaatttttctaaaaaatacttatcagtaagcttatcatttttactaagattgcgtttagggaaagggctaaacaaattacatagtttatcattcttaataaaagaccaaggaataaaatgatcaacatgcattttcccaaattcaatgcctttaccacaataaaaacaacttctctcttcttctgtaatattgtaataaagaaaatttttatatactgttaagtttgtccttttagatatctcattaagtttaggaactatactatagcaactttgaagaggattaatcttttctaaaaatgaaatccattcaaaatatattaaatgtctattacctaaaatatatctatcaaagattgtattaatactaacctttccattccttgtagcatttgatccttgctttacaatcaaattacaataaattcttgtaaatcttgcaaaaacatctgttaataaaatttctcattctatatttacttcataaacacattctataatagttttcaaaaaaccaaacttataagaagtattattaatagatttagaagaaaaaatataattaaacattttccaaatatcttcttctgataattgattttgaatatattgtgcctcttttattttccaactttccgtgaaaatacccactatgatttaccaaatttgtattcatatatttaatattctaacataatacgtgttcattttccattttttatgactattgtaaataaatattattgttttacactctataaatcttacaatatatcctttattttttatgtatccttttataatcaaattaactagaatttaaattcctattttagtatactctacttaagcaactgaaaggatttgattattttgaaatcttttaatggaaactctagtaaatataatttatatgaacttactgttatatatatgaattagttagaagtggaaaactaaaaaaatttccaatgtacttttgggaaagtaacgaatatgctccaattattacaagatggttaattgaagaaaaactaaaaactgatattccaactgccaaacaaaaactttcaagacgccatttcaaaactaataatttatatggtctttatgctacatatccattagataaattaattgaaatggttgaatatgattatgcaacaaattaaatttgattctataactgtatactaagaaagacagtaaacataaattttctcttgttcactgcctttcttagtatacatctattctgtcattattaatattttgaatctaattataatttaattcctaatcattttatccaatttcctgttttatcaacactaaatccatctggtgtgatacaatcgcaatacattttaccctcttgatcaaaagcataacatgcactatcaatccatttccacaaaggcttacctttactccccctaatcattttgcaatcagaatctaagtagtaccaggccttatcattattatcatagtaccaggcatcttgcaatgcgtacccattggaatcaaatatatacaattccccatccatctcttgccaaccatcttttgatgtatagtagcttttatcttccaagcaactgcaataccaccatccaacatcattcctattccatccaagtttccattctccattgctagaatcatcatctccaactaatccactaacaatagatcttgcaataacttctggattataaactgctgcatcatcactatcagcaaataaacattcaactaaaattgcaggcataatagtttcattaagaacaattaagtttcttgtttttactcccctattaggtaaattcagagcacttgccaaagtattacttactttagaagcatattgatttgctacttctgattttccaaatactaatacttcaggaccagttcctccccctgcattaatatgaatctcagcatacaactcaacattttttgtcttagctatctcattagcttcacttgccctttcatagcaatcttgacagctatatctattactcttatcaattctaagtaaattaaccccatgacctctccgctgcaaatactctgcaactaaagctccaatctctctagtgcacttactctcatcaagcctatcaacaactccacatccaacatttccactagcagtatgacctactgctattataaaattactcattttacatctctccctataattcttaatttttttaatcactcatatacgttatacacatatgaaaagagtagctatgctacaataaggaacttttctgcaattagaaacttaaaaaaatattctaaaacgacagaagctcaactaattttatatttcatatacgttatatggattttaaccatatatactatatgtagaggtaaatttaatgacaaacacaataaattacataaacctcttcgagcaatcttttaaagaaatcttgtaaggattttatccaaaactcttaactgaattaaaggaggtttatatggattttaattatattgaatctttagttatcaaatgcaagaataacgatgaaacagcaaaagaaaaattagctgctgaatttaaacctttaatttacaacatttctaaaagaacctttattgatggctataacatgtatgatatacagcaagagtgctttgaatcacttttcaagtctgtttcaatgtacaatataaaaaagcatagattcgttgcttatgctactaacgctattaaaaataatataaaggatcttataaagagaattaaatctagaagctccactgaaggtaatgaagcattaagcttatattataattttgaaggtaatcttccttcagaagaaatctccactgaagtatcattatgtgaagcgtgtgattatgaagatttaagactggctttagataatttaacccgagaggaaaaagaatttatagattttgtattctttaaaaattatacagttttagattactctcatttaaagaatatgtgctattctactgctatcctaaaaaagaacactattctaaagaaaatatcaaacaatatatttcattattataaaagcatcaaagcataaaaactccaaggctcacttggagtttttattttgttcgtccagcatgtttgctgagctggcaggctgaaagaagcctgcgtcgccgacccgacaggaagacaactcgaaggcaagtgcgttactggcaacggtagggtatgaaggaagccgaaggggacacatggaacataacgaaagtaaaccaatgttggctgataaagtggataaccttgcaaaatatgggtaagtcctaaagtcggaagtagctttatcagttatgatggatggattcatgtgaagcaggcagacttaactggagaagccctatattatctctattactggagtaattatcagacaagttgaaagacaagaatgatatatgtagtgtagggtgcagatgaatccgtagtagttattaattctgagccaatgaagggtggtaacattccggagggaaaaactcagaagatattgtacgttgagttacaataggctaattctaatcaaaagttattattagttgcgaagggaggaagatgaatcgaagttaggtacttgaaataaattatatgtagactaggcaaagataaagaaggttgaaatactggaaggaacgtctaaatgtggagtaaaataattcatctgcaaagcacgtccgtgccgtgaatactaactatttatgaattaggtatattgccatagtgctagagaaaccaatcttaatagtgaaattaaagtcggtttatataacaaatttaattttaaagaactaagcaaagcaagggaggtcacaatgaagaaatattatagtttaatagataaaatatataataagaataatattttagaggcttttaaacgagttaagaaaaacaagggtgctccaggagtagatggagaaactgttgagtacttccaaagtttattaggtgataaaattaatgaaattcattgtgaactcaaagaaggaatctacaaaccgagtcctgtaagacggacttatattgagaaagatgatggaacacaaagaccgttaggaattccaacagtgaaagacagagttgttcaacaggctgtaagaaatattatagagcctatatttgaaccaaactttcatccatccagttatggctatagaccgaattgctcctgtcaaaaggcagttgcgaaagctgaaagatttcttaataagtgggagttggaatatgtagtggatatggatttatccaaatgttttgatacactcaaccatgaacttataattaaaagtataaatgaaaagattagtgatggaaaagtattgagattgattcgaacatttttagaatctggaatactagaagatggagcttttgaagaaactcctatcggaagtccgcaaggaggagtaatatcaccattgttaatgaatatatacatggataaatttgataaaaagatgatggaaaaaggaattagaattgtaagatatgctgatgatatattagtatttgcaaaatcggaaagcgaagctggaagatatcgaactattgcaacaaatattttgcaaaatgaattgaaattaacagttaactctaagaaaacgcatataactaatgtatacaaaggcgttccatatttaggatttataataaaaagaaactacatatctatacatcccaaaaggattaagaaattcaaggataaaattagagatttaacacctagaaatagtggtactaatgttgaaacattagttaaagaacttaatcctgtattaagaggttggtgcaattattttaagatagcgaactgtaaagtgctatttgggaatatagcaggctggattcgtagaagactcagaatgaaaaagatgaaagaatggaaaagctataaatcacttcataaaacgcttagaagaaatggatacaaaggagatttcaaaaagattcgcatgtggagatggagaaattctgctagcccacttctaagtatggcgcttcctaattcgtggtttgatgaaatcaaactgtttgacatgtccaaagtagaaaccaaagttttgtatcgctattattaatgatgtagatttatcaagagccgtgtgcgaggcccgcatgcacggttctgtgagaggaacaacctcagaaaattatttctgaggtttacctactcgattatacaattatattaatctatatccactcattcaaaattaaaattattaatagcagctgtagtcttatcaatatagttttgagctacttgatcaatgctatcacaaatatacttaagagaacaaccttcacatttattaagtattccttcagtaattaaagagcattgaagttcatcattaaaagtagaatttctaatagcaagagcaatctgctttttatcaaagcactctccttcttctggattaagtttaatttcatctctaatcatttttacaacacactccaataatttatttacaactttaaaatttagcagctgctattattgatatatgttttatactgtaaaataacattaaaatcatgattaaatttgtatgtctaatctcctaacccgcattttacaagcaaattcttaaattctaaagaatatatattcttaaaatcttacattctaaaattccttaattcttaaattctaaaaaatttatattctcaaattctttagaactttagaatctctaataaacagccatatatcctttaagagaatacataaaaatactgataaaaaaaacaccaagggaggttatataatctatggctagaaaaaaagctgcgaagatacctaaaaatgattttgaatacgatgaaggtgaagtatatggatttactagcgaaactcctataactggtgactgcatatcttccttctcttttgatgattctgatactaatattattcaaactagttctgatagtaaatctaataataattctattcaagaagattctaaaaacaatgctcaaactaatacagcttcaactattaacagcaattttaaaaataatataactaactctatagaaataaaaaatactttaagctctactagagaactgtttgataatagaagaacaccactacctaatggtgccactcctgccattgatggggagactccaaatattaaaagaagctacacccttagaagttctactataagaaaaataaatgaattaaaaagcatacatccagatatcaatgtatgtgtcagtaccatagttgatattgctatagaacattatcataaccatattgtaaatgaaggtggcactcaataatttaatctatctattttattttcagataattatttgttccttaatatgaaataatatattttatttcatatatcccttatggaggtgatgagtttatggaagtaaatcaattaatggatcttattgttaataatggctttcccgtagcagtgtctgcatatttgctaatacgcttagagaagcaaattgttagcttagcaagttcaattaataagttaaataccataatatcagctaaacttggtgttgctattgatacagagagttctactgatgattctcataaagtggcatgagtaaaaaggcgataaacattattagtgattatcgcctttaaatttatttgtattagaacaccgaaactaagtagtttaatttgaatttaaattataaaatgatacacaaattaagaataccatgacataactttataatttatctactacaacataatactcattttcttagaagttgttttttagtatatcatcaactcgtattgaaatactttctttacttccacttttcataatttcatttagtagatttaaatcgttggaatttaattcaaaaattccaacgtaaggctgatccacgtaaatatcatcattctcttcatagaatgacctccaactagtccccccatttataaaattcaaaccaattagagtaaattttgttttatcaggaaaattcgaaacactatctttacttgtcttatttgaatttttcaatatatttagcaaattatctatatctgattgtttagaaatagtaatcttttcaacaccttgacaatggataatattgataaattcaacactacttaattgttttgacttaggcacttctatttgactttcccttaacataaaaatcaaacctacggcaacaacaatacaaattgttacaacaactaaccattttatctttctattcatattattctccttcacaagatgcgaattatacttacttctcaataatttattatggagaaatattaaaaaaacaccttaaattcatttcttgctttcttcaagtgtatctaaaatactatccaatttttcattcatttgtttattcttttttataaagcttttaaatgctcttacccctttatatattcctattattattaaaattattaccccaaaattgatccaattcataattagagtcatataattaatttgcataagccttctcctaaccacattaaattgtatacttttaatatattttttataagcctatagtttttaactattcaatatcactttatatatttattattatattacatctgtatttatttacaagtttttcatattcttgtatcaatattattatgtaacaaattaaaataatacaaggagttaagatggacaaaataaatctatttatagttatgatgtatttttaaatctagctatagcttcattcagtccatcttttgcaatccaataacgtcgctttgctcctaaggaagagaagttcaagccattttatatattttgttatttttagaacctatatgtcacgatagtatattctaaacatttataaaatctatatatcttgaacttctcattaattgttgtagcctgcggcagcaaggaataaatatataagagcactgcgtgctccttgtggctgcgccactctattagtttatttttatttctacgtatttaattgaaattatctttatatactactagctagtttataattacttatattttatctacatttttatattatagctattatttgtatacctatatacgcattttctaaaggacaagtttatttgctttagagtttcttgggtgcctcatccaccacccaaaaatggacaggtcatacagctacaggcttctaacattgtaaaagtctcctccttactcggagccttttacaaagtaataatctgtacgctatctgcctagttcattgtttgggttcccggtggggcacttcgggatggtggggttaatgattaaattaaaatttataaatatacagttatttacctttcttaaattagtatatgatttatattccatccctctgactgtaaatgtagtttaatgtactttttacggtatattttatgattattgtttctggtatatggaaatgtaaagataaggtttagttggtcagacaagctgacaagaatttttgagggcttagacatgccatcacaattatataagaaagtattagtaatgtgacggcatgcctatcttgtacaggcttatgtttattactataatgtttgattatatggttttacgctctaaaaatccaatcactaaaaataataaattgtattacatggaaattatttttaatgatacgattttcagagctattatctacttttaattatgtagaggtattaaaaaagccagtccaagaccgcccccattgataaactctagattatacatcttatatagtttttttcatataacatgatacatttctttaaaatacagctcaagacacgcttcgcttttggtcttgacctatattttaaataaatatgtaaagttaatatgaaaaatctatgtgatattataccgctcgattggacatgctatttttaatttattggggatttctccccttatgtatttagtattgcaattcctcacatgacaaactttctaatatattttcatgttctgcgtttgcttgtttgtaatattcttccctgactttttctatatcttcatttctttcagattcataatctacaaaactgttaccctcaattctgcctctaaatgacttccagaattcataatcatcactggtagcactgaatattccttttcttcctatgttctttttataacttaattttaatccataaagacttaagggtgcaccttcatactcaataattattgatccattctttagtctatacgctgtttcagaaaatctaagttctttattttcgcttaaatatctgtactctgctattaatgtttttgattcatattttctcttttccacttttatggccaccttttctttttacttcctcctccaccatatttttattatgcccactttcagaaattttagacattatttatgtacaagaaaagcaccttcttaggtactttcattacttataatttattctccaatacataatttcatataccctcttatcgccttactaacgtcttttccattcctgtgacaatatgcttcaaagtcttcatataacttaatctcgcattccacatgaagctgctttgtaggcagttttgcttttttaaacttatttctattttccattattattccactccttatctttaaaatattctagccaacaattaaatttcttatacttaaatagctaaaaaaatatacaaataagtacaagcttttacgaatattcgttcgcattattggcaataattatagtataaggttaagagaggatttgagaaaaatatgagaaatttcacatttacaaaatggcttactactaaagaagcttttaattcttacggacactataaagattggctttctatcttatcaaaagaagaatctaaaaaaactgatttatattatcacgaaaaatatcaatattttataaattacctacagactgaatgggattagagaaatatacatctctatcccccattaaaaatatctatatgagaggattcgatctaatgacatttacaaaatggctcataaaagaaaaaggctttgtatcaaaagttcaatttgattcacttgtaaatacactaccatatgagggcagaagaaagttaatcatatactataagatagaatatgaacattaccttgatacaatgccaatgcaactagaacttgaaataaaataagcctgaagaggtcctcttcaggtttgctttgtttccatttaatatagcacaaactacagaattaattaccgaaattataggacaagcccctgttgtttttggggcaaatacttaaactccatataaaataaatattgtacaggggtgaacgaagcgaatttcccctttacaatatctattttatattggtataattgctctcccaaaaaacattattttagataagctcaattactaaaacttataaatgtattatatatttatttataatctaacacttcaattttacacagatttttagtaatatatcttatttttatttttcatcatcataaggttttcttacattatgaatcatacttttttcacaagcaccaaactctaaaaagttctttcttgcttggtttaaactaacatgatttgctccaccttcacaattaggattattcaattgtataggatcatcttcccaaaagcacactgaacagatatcatagtttccatcaggtattccatcaaacgtgaaatatccacaacaggggcattcatattttaatctagcactctctttttgactatttttcataaactttacctcttaccacatttatcattaattggtttatagtttaagtattattaataatattttctattaactctcttatatcatgaatttttgttccatcttcaactaaaaaatctgtcatatcataatctaggcctactgacatattaaatttacttgcgaacttacctttactttaaaactttatatttcatctattgatattgtgaaataaatttaataaaatcctgttcaatctcttctacttcaccataaattctttctttagctaaatatagaccatctgatagatagtttatattagatattatttcattgtctaaatctgtttcctttagtaaattatctagataataaatagcattctctagggttattttatgtgaatgatacctttcacgtatgatatatatcaaatgtttatttatgtttgttttagaaccattattactataaaaatattcttttaaaatatgcaaagcatcttgcatgtttttattgcaagccaaggatgcttcaattatttcataaggtggttcatctagatcaaatataattttatcaagaaattcacttaactctgtcttagaatatattccacatgccattgctattctatatatttcaacttgctctactaaatccataaacttctccctaatatgtgctttttacatcatttacttatttctctatattcaaatattttactggaacataatcagttagccataccttattttcagataaatagaatttaaaaacatcctgatacatttgatgactattaattttaaaaataattaattcaccatgtctcttccccgcttttgtagcagtttctatatctttagataaatgaacgtattgcctattttctttcttaattccttctgtacatatactatctctaaatctagtttcagtttggcggctctattggctttaatttaagattaacatatccaatattcgtctagtgttaatccaatctcttcagacttatgtcttaatactaagcttataaacttactaaccctcacatcttctctgattctcattacttttactactctacttattttattcttgtgctactaaatagcactcatatactgttttcatatatctaaaactaaaacattttctctttaggacaaatgttgtatttaaaggtaatagaaattcacactcgttcaaataatcattttcatggtaaaattctacataaacgccttttgttcccttaggtaagtacaactttagtaagcagttatacctatgagtatatgcaaaggctctaagtagatcaggaaccaatgttgtatctataaatgccttatctgtaaaggtatgtctaactttgattttttgcttttcaaacaacaattttaataattccttgtatgtatagcgccaaactacaatattttctttaagattaaatttagatatttcattatttataatatttattctttgattgaattcctcagtctcttcatcttcactatcatacttttccgttcctcttaacattcgattatatattagatacatgtttccagtatatccatatagcaaatcatttaaatttttactctcataagcatattctgttatctgaatatcattcagccattgcccataattttcttttgcccatttcttagcatcttcttccgtagtaaattctttaaataggtgatttaaatttttactcatatgtagccctttcaaattatatttaattgacactccattttaccaaatccatttatttttaataaaatactaatatcaatattataacatattttcccaatgctctcttatcaaaataggcgccgtcaatgtgcttgcttttctgcctgtccttattagtaattagtgttattggagtgaaaagaaaccgaatcactaaaaataatttcctcttaaatatctatttatagtatttttagtgattggatttcttaagcggaaagaacgccattactaaaaaggattagcaggtaagcatgtacattgtggacctgccatcaccttccaacagactttatctctatcctgtgatgacaagtccaaggcgcccttttatttatgcgtatgcatcacttatccataatcttcagaatgatatacatttcatctgctttctattgttcatgggatttaaggcacaacctttaatcccgtcactacacttaagctgacaactgaagaaagtgtcaatgtaatacttggatcaaagctccttagtattacatattgactctttctggagtttgaatttagaagtaaatttaaaggatcctctttgaaaagagaaacattaactttctctccccattctcacatttcaacaaaaactcttatctgcgcatgcagcattatctccattaacacaatacaccaaaaactattgtaacaccatctctatcatctgcaccaagaaaccataatacaacaaagaaggcatgtacatttagctaaataacgtttcccgaagtgtcccagctgaaattaagtaataaaccttagtttttcataatttccattaacacaaaaagaccataaaaattcatggtctctaatattttagctcggacattctcgggacaacgggttattctagcgaagtgtacttgccttcttgcgctccatcgggtacccaaacaaaggactagtctaatgcataatagctcttagtatataggtggttggagcttgccggaaaactcatatatgcttagagatatatgctgatgacctgtccccttttttgggtgatggattaagcgcccaaataattctctatattaaaagtttatactgtagtaaatgcatatatacaaataatagatatacaaataaataataaattaatatacaatacatattctattaatgcaaaaaacataagacaaatagtattaataccatatccataattaaatacaaactctaatggattggagcatcagctccaacaaatatattttcaattgttccagccctttagggctaggacaatttcctttgtttgagcgcaagcgagtaataattaaggtaataagaaagctttattgtgaatactttcagctgggtttatatcatatcaacataaatttctataaatatctcaaataataatataagcttttctattgcttcctttgacttgaaggttaagccttgaagtcactagagctgcgctttagaacatcattaagaagaaagtaacaatgcaatagcttgaagcgtaagctttaagctattgcgtattgtttctttctggtccctaagtttcgaagtaaatttagagtaaagtggtagcagaaaacattaacttctttatactattctctaaatttaaataagtatacaatgtcacttaaataaaactctatttagctaatttttgatttatcttacagcttagatatattcatttatttaaatcatttttataaataagttttaaaaaattatttgatttaaaatacatctcatagtcattatacatgtcttcaccaatgctgtccttaattttcttaagttctgctctttcaaaagccagctgctcgtctaaaatgtttaagagtccattcttaatttctttcaataacttatagtctttaagcacaactgcctttccttccaataaaggctctagaatgctttttattctctcgcttttactcgagtctgcataagctctcctaataagctcatgatttacaatgctctcaatttcctgaagaactagttcttcttttttcagcatatcttcataaactgaattcctaaatttaattcttttatttaaagaacaggtaaactcttttctcaaatctttaactgcatccttttcagctttaaattcgtttaataaatattcatctgcataaccttcttttatcactatatcaattaatttttccattatctcacctaatatttttctactatgttgtacttgcaatttctttaataaccttatagctgtctagtaaaagatttaaaatatattcatttttagctgctaattttactaattctgatatagagctttggtgaatctgtttatagcttgcctcaaccttttcgttgctttcttttaaatcttcaaaatttctatttgtttcactttttagagagtatataagatctctcttttctttagaaacatcctctaattctcttaaatgttcttctgcattctcaattttgtcctctaaggattttagacttgatttgcagtctataagcttatctaaactatctttctctacctccattaggttcagtgcattgttatttcctttctcaagttcaagtttaactccattgaaaattgattctatagcctgcacttgtgtattcacagaacttaacactttatgtgtctctgtttttttctctaggtttacttccattgctttctttaataaactttgtatttctttaaaatcttctttatctgcctctaacttttgctcaattgctttagtaattgtttctaatctttgctcaagtactttagtaattgtctctaatttttcctcaactattttagtatttgcttctatttttttctcaaagccttcagctattacttctagcttcttgttattcttctcctctttcgcctctaactttttattaatctgttcttccttttcttctaactcttgagccttccttttttctgatttatttaataaataataagaaatacctgctgaaacaacatttatccccagtattatagatattatattaatattgtatgctccttttatggctgctgtaattattacagataatacaaccgccttaaatccaatattgtttttcattatcaattcacctctctaatctttagtttacttttgtatatatcatttccaagctgtctcctattatattatctaatagcactattttgctctttagaagcttaacataagtatctgtataggtaacactgcttttataatttgtaattttattaagatctgttgctatctcagttcctatcaagtcttttagcttaagttctaagtcttttgaaacattcaaataattttcaacaatttcatagtttctgctaaaatcagcttcaataattatagtttttaaaatctctatggctttttcagtaaattctttcatacatatatttaaaatatttgataaatactctgaattaaactttctttctgatatatccctgctcaactgttcgcatatttccatgctgattattacatcctcttttcccattataactggtaccgtatctagatatctatcttcatcctctttagataatttgctaagaagatttttttccttgtaaaagtacttcatattaaaaaataaactctttaatttgcttaaatcctcaagtactgtttcatattcgcagtcctttaaattcattttttcaaaaaaatctaaatttttagctacgattactttaacagccttttttataacttttctatcaattcttttctcaagtctaattctaaagttattaattaaatatggcagagtaaaatacagttccaaaataccttgtgaggaaaaatgatttactttttcttcacaggaatcatatataataacactattatactgatctaactcatcctctatctcttctctaatttctattggaacatgaaaaacttcttttaaaacagcctcaaaaccttcacagatacatagaatttcatcttttatataaagtgttttttcagcatccattgatacagaaacttcttgttctgcctcaatgttgtttttatagccttcatacatatgtggaaaatactttttctgaaatagtaagttctcgtaaaccctcatgttacattacccactcttcaatccatacttcataatttttaagttcctctagaatattggtattccttatcatttcctcttccatatcctgccttttagctttaagcttttcagtctgagcgtttaaatcttctagtttctttttaagatccttttctcctttagaaataagtctttgtattgctgcatcaaaggtaacaatagatatatgctctgctttcttgctttcattttcaaatatactgcttatttcagttttgtagtattcctctaccttttcttgaaaatctttctccttttgatattgaaacttttgttccagttccttcttcaaatcctcatatctattttgtttgtcctctaattctctctttaatcttaagctttccttaatcgtatcaacctttcttaatgcgtcctctagttccctttgtcttcttagatttatctctatagaatctttaatttcacttctttgagcctcccacatctgcttcttttcttcatcttcaataagaatagtagatgttggttttataccttctcctaaagattcacctactttttcaccccagtagccaagagacagcatatctagtgctttaccaataccatcgattacccctgttccagttccttgcctttcttgtattccttcgccataagatcttatattttttcttgttttatctactgtgtttagcacttttttagccttatcaatctgcttttttacatctaaagtgctttttaaaggtgtagaattaacagcttttactcccttttgaataatagatgttgcttttactgtatccttagctacatcagccactttagctgctcctcctgcaggatttgcaaatataagtgctatatctgctacttctccgacgaatcttccaagcttcgctcctattccacctcctccatttattacctcttctctgtattctggaatatagtaaccaaggtttctcatttcagctttgtactcatctatattctcatttagtgcttcaatactatttcgaatttcttctttttcagcctcagttacagctatttcctgctctacattcctaagttcctctaaactctgcctttgaatacttattatttcctctatttgagctctatgatccgtatcatctagttcctcaatggttggctttctaatatctgtatctagttgaatatctattgcaccaatgacaccatttatctcttcacatatagaattataaatctcaacacttaaatcattaatggataattccagcttatcctttaattttttacctagtgttgtatttgtaatattaaattcttcagttattatttctttagtaatatcattattagaaagtattcttgctgctattttctcttcttcatttttaaatatttttttaacttcaatagaaagttttttctttctatcatcagcaagttcctgaagattttctattctctgctcttcaagtttatttatacttgaaattttatcttgaaagttttttaacttttcatcaatttcagatctatctaaattagttactgataaaagaagcttattactttgttcaaattcctttaatttttcctcaaaaattattcctaattgtctcttaactctatttttcataatttgaagactgttaacttcacgatactgctttactgtttttcttataacctttatatatttctcattattgtaggaagctctagaaccaactggataaatctccggatcgtctacattcagactgttttttagctgctcttttgcttcctttataaatctctctatttcagcttcttccctgtaaatatactctgaatttctttctacatccatatgggtaattacaaaaataatatcatcagtgtactttaaaatttccttaatatttactatatctgactgtgcaatagccttattaaacacgtatattacaatatcagattttttcaatatatatttagttatttcttcatgctcttttataattgtatttgtgccagggctgtctataaaatgggtattaaaatcaagataatcagaatttactgggatgcttacagcaagaattcctaaatcatattcctttgtgtattttgcatattttctaatgttctcttctgttgcttcaactcttatttcttctccatttttatatttaactaccatattttgctctgagcttttcataatatctatgagtactggtgtacattcaccatttgcatgaggcagataattttctttatttagaaaggcattaacaaaacatgtttttccagagctgaattctccagttacaactataattgactcctgttctctaatcttttttatatactcttctatagtagaaggattgatattatatttttctaaattattcaattccatgttatagttcaccctctccaaactttttaagttcatttatactatccaaaatgatttgaagtttatcatacatagttttaatttccatttgcagctcttcaggacttgcacctgccatagtagacattgcataaaggttattcttcaatccatcaagctgccttctttctccatctaaagcaccaagtattattgttgatattaaatctttattgctatctaaaaaaagttttgcaatacgttcatattcatcgctggccctctttatttctttaaaaaagttatcttttgatactttaattatttgactggaaagctttaatttttcttcttcttctgtttccagcatctttaaatatctctctctagattgttttgtatcaaattccatatcaaaaattttgctgtctatatcaccaagaagcatggcttcatataacttatttttcatttcctcttcttttactgatatttctgaagaaaatttatcctgtacttcaattctcttcttctctacaaattctacttcactgttgtctacaaaagattcccttttacttactgtcttaggtccaaatagaaaattacctattcctccaaaaaaaccttcacgtttttctttataattgaccatagtctcacctctataaggtctggcttccccaattgaatcaagtcttctctccttatcccctgagagtttttctatttgtctttcaagcttttccttttcactcatcagaagcatatacttttgtttatcatctctgctgcttaaaagcttttctctatagctctcatattccctttttctattttcaatttccttatcaatctcctgaagctccttaaagtcaaacttgggagtttcaatatctgtattatttatgtcaagactcttgtgtataataggaagaagtctgtcccttgtttcagctacgtctttatcactatcgatattttcttcaataatctctacaagtttgtcttcaagcttactgcttagtgatgtccacttctttaaaaacttatcatgaacgcctacagccatgcttccaaaatccgttaatcttaaatgaaattgtgaggagatatccttaagttcatccttaacttcttctactatttttgcattactgctttctattgaatttctagcatttactacagcatttcttacattactttgaatatatcttttcttttcctttaattctttttctgcctgttctattttcttactttcattttctagttctttctttatatcttcctgatttttactgcaaattcttattctctcttcaagtagttttctttcatctttaagctttgcctgaactgctgaaagtggttcaaaaagtctatctctagagttttcatcactagttaaataattgcttaattctgtcttaaagtagtcaaactttgagtgttcttttttagcttgagaattttctttaattgcttcctttgccaattttgctgatattgggtatatttcctttccttctatagccaccttctttgattttaatttgccacgaagatcttctactgtacttctcaccgaattttccctattttcaggatcatcatcaagatcaatcttatttactacaaaaaatactctattcatatatttattaatatagcttaagaacttaaattcttcttcagaaccagccttatcataagtaaacataaatacagaggcatcagatttttctacataaccttttgctatatccgtatgtattgtataagtagaattaaatccaggagtatcaactatttcaactccattctttaagtattctgagtctaaaaaaagtgtaatctctttaatcttattttcaatatcaaaagttttgtttcttgctgaatagtttttcaagtctcccattggtataatatctacagctccatctgaatagacaatctgtgccttatttaaaaattctaaatcattagggtattttagtcttgtaattgtagcagtacttggaagatcatcctctacaagaacttcttccccaaatcccattagagcatttaagaaagtactctttccgttactaaagtgaccaaatatggatattatataacggtcatctctaatgttttttaacttttgttctataaattgtatggtagactgttctgtaaccttctcttttacactgcataataaatcaatgacctgctgttttttcctcatataaatatcaaaactcatgatatcatctcctttagtttatctaatttctctgaagtttttctaaaactctcgccactaacttcagcactttgaaacatttcacttatcttttgatctatggagtttgaatacttctccagataaccttctatgccttgtttaaccttttcctttatctgattgttcatatattgtgttttatcttttacttgttctaagaggtcttcaaaagacttatctttaagcttttcaagaattacatatatctcttccttcttcccatctaaaaacaactgttcactcttttttcttcttttttctatattttcttttgcttttctttcttcctcttttaattgaagctttttcctagcataactttgcacaagttcgtcatttgttttaatatactgaatcatttccctgtagtgttcttgttcatcatcaagtttatctatggattcaaaaaattcattggttattttttgactttttttatcccattcatgacatctagaataatcaaaaccatctggaacttcttcttcatactcttctttaaaaatcagccactttcttcttgtcctagtaacccatcggtatttctgttctggttcaggtcttgaacctaattgtaattttttcctttccatatcccttttagcatcatttttcttttgttccagtgaattcaccatatattctggtgcttgattcttcagcctagctgtatgtgtatttatatttttgattttctcatcaacctcattaaattctttttttatctcctctaaaattgagtctttccgaagctttacatcattaaatttcaaatcaatatttatcttattaatactttcagtaagttttaaattgctcttcaaattaaatattgccatgaactcatcattaaactttttctgaacaagactgtaatacataacttcctgatattcatttaattttgtttgaaaagtactacaatctttttctatatatttttttattaaatccgagcaataattaacgttctcttgagttaaacttttaaaagaaataaacctttcttcaacagtacttgctatttctttatttcttatttttttaattgtatcaagatccaaagacatagttcttagaaattcatcaaaggaatttgatatgtacctaaccaatgtattataaagctttctcctattgtctaacaaaagcttcttttgcaaatctaattgtaatagaagtttatctctagattttgcctgactattatttgtatcagctaatacctcgttaaaagcatcaataaccataaaaattttattatttatatcttcaaggaaccttacatttctattgccttcttcaagaaaattaaataaatactccttaaaatcattgaaactggatcttttttcataatccttctgactgagaagagtctttacttcttcaatattatttttctttatttgattgtaaagttcgttatccttactccataaataatccctgctgtctaaggcaaaaacctttatgtgttcaagattattttccttaagtttttcctttactgaatctattacctcctgaattttttctaaagcttcaggctctgttttaccgtcgtatatctccccaatcttgtttataacaacaaagatctctttagtatttattcttccaaagtcaagatttttccctgtaagaagatcaagttctgtctttgaaaatccttttttggtaattaacattattgttgcatttgcttcctttaaaatatctcttgttatctccatttgtttgtggcttatgccttgaagccctggagtatccataaaaacaacttccttgtctatattacttaatgggtagtttattccaacgctaactatctgactgtcagaattttttatatctaaatacctttttaagctttcatagcattcttcactagaaagtgatatctcctcaacctttccactttccaagagaactgaagctgactttttcatggaattctctaaaaaggtaactactccagttgcctctttaggtgaagaatataaaattctctttcctgaaattgcatttaagaaagtacttttacctgaagaaaactctccaattattgcaactttatatttattctcctgcagcatatcctcaagtttaagaatttctccataatataagctattaagctctgaacttatttcttttaagcccgaaattactctcattgattcatttctatctagcataattctccgcctttcaatggtgttcaatattaaattctacacataccaccaatatcctccataaaaaccacttaaattttataattccagtaaaagtcactaagttatttgtaacattattcataatcttgttatttttaatataaagtttctttaaatctcatagaaattgattgaatttaataattatttctttagtaattgtcccattaagttttgtaaaatctataactggtaaatcaaatatactaatttgtccttcgatgaaacattcacttttcatatttatcctttcaatatctttaatctgttttagttcttttgttcataaaaaaacaaatattttttatctatatatgtaatgttaagcatttatccatatatcctttatgaaaacaaaatgaaggaggttaaaacttatggctgtaactaaaactatcgactcagtttctcttagtatcgaggttcaaaaagctttagacaaagctggggacccaatttatgccaaaaaaactttctcaggtataaaaacagatgctacacctgagaatgtttatgctgtcgcagatgcaattaaaggtgttatggaagctaacactagagattactttattaatgaatcttctagtttagcaaatgcttaggatcttattcttaggtaaattttaaagattggaggcaaattaaatggaatattctttatctatgacttttttaactgtagctggtgaaaagagtactttaagtgtttctggtgttaaacctactcttacaaaagatgaggttaacgcacttatggatactgtgattgctaagaatgttttcaaaactaattccggtgatttagttaagaaatctggtgctcaagttactcaacgacaagttactaaatttgatgtagcttagtcttttaataaaaatggaggtttgtcctgttggaaggataaatctccattttctatatctattctcatagtaatatataatttaccacgctctaatctttatcctgataaaatctatcccctttttcttatataacaacatcactataaactaaagtaaaaaagattagttatatatattcaatgtagttcaacctcagcccctaactctttgaaatttttaataatctgtttcgcttctttaatactaatactttccttaattatacttggcacattgtcagacaaatccttagcctcttttagccctatcccagttatcattctaatttctctaataactgatattttttctttaccagctttaactaatataagtctcacattattcacttcagaatttatagaaacttcttttttagttttagtttttatctcattattagcattaatattaactgaaaaattaaattcttgtataacctttttaccacatggactatcaataggtaccatattttgcgaattacactgaggacacacttccttctttccagcatttctcaacaactgataaaatattcccggaatcaccgcagtcagtatcaatattaattctatgatactacttccaggtctaatagattttttccttcctatatatccacattctcgacatataaattttttcattataatatcctccttatcacaataaattgagtattttcttaagatcatttcacttatatcataaagtattttcaaagatatatttgacattatattgaacaaataagtttattttacttagaagatgtagttttcataaatcaaatcttaaattttaatttagttcattaaaatattatctataaaaaatattcattatcgttactttttaatcatagataattaaggcatattaaaattttatacttaattaggaaatttcttgttattttatagaatacaattgtagtcctttctatattcatatatcatatctgccatcttagttataacttctaataactctaatttttctatacaattgttggatattttctctattcctaaaaatgctcctaggatatttcctgtaatagaccctgtactatcactatctccatcatgatttactgctgctatttcagctttactaaaatcatctttatattttaaggcacaataaattgctatagctaaagcttcttctccaacccatccttcacctatctgatttatagctaattttgtatttatagtgctatctacaagatctattgcctttttaatagtagcaatacattcttcattcccttcatattccttggcaatatctaaagcaatattcactgattcctctatatcatttccagaaattatttctgcaataatacaagcaaaaattccagcagatatataaccacttggatgtccatgtgtaatagctgcacactcacaagctagctgaaaagctttcctaccttcaaacattaatccaaaaggagctactctcattactccaccacaacccttactatcattgattggctcttgtattgttcctttaatactacttttaagtgattcaatgcaagtaagtccaggtgctctctttcggtaaagttcctttttatctaaaagccaatatttagacaaatattctccttcagcagattctccttgagtataaagccatgccaaatatgaatcataaatatagaatataatttctgagtattttcctttatttaatcctataagtaacccttctgctgtaaaaagagtcatttgagtatcatctgtaatttctgctttacctttctctcctattactaaatcactaattcctttagttccatacttctctttaatctcactatctaataaaaattctactggccatccaagggcatcacctatagctccacccaagagacatcctctaaaatattccttgctcatcctcatatcactacctccatttatgttttgttaaactaatataatttcttcatcttttgcaatatggacattttcaaatttctcagcaaataaatttggattttcagtatgtattggaataagttttttaggatttatactacaaataattttctgcaatgaatcaattgatgcatgtccactagtatgaatatcaattcttttcatattttttaattctaagtactccaatattcgtctcattttttcttgctttttataaccactccacatggaataaataaaacctgaatcgtttatatttggaatatgctgaagatcagataacattgagtctctgattatcatacaataatcatttctacttccaagttctgtccttgaaatccaatatctattaaattttttcattaaccgttctccttctggttctttaaacatccttttagtaaggtaataaggataaaacactctaacatctttaaattcacttggttttggaatacttccatctaattgtgctacaatatgtgctgtaaaaatatccattacaaaaatacgtccactacgttttgctgctttgtacattccaactaatctatcaatgttggttgaagattgcattacaaacattggatttgctttagatttcataaaattataggctttttgttctatattttcttcagtttctacaggttcattaagtctactcatcatagttccttcaatgagaagagcatcaactacagctggtatattatatatgaagtaatccgtagccttcttctttcttccatgatctctcaaatctccagtataaacaatacacttattgtcagcttttattacaaaagcataggcatcaaaaccagaatgatctaccaagtaaggtattatagaaaaatctccaattataatttccttgccacttatgaaataattcactggatttaatatgcacttacctcctgtaaattgtgatgttacattaagtatttttaaagctttttctcctataaatactggtatttctgagttaacagcttcaatcaaacctacatgatctccatgtccatgagatattaaaactgcatctattaacctaacatcatctttgtataaccccttaacccttggtaatgcagatactttgttaggtttatcttcatcgatattaggcagttcctgcccaatatcaagtattattctggttctttcagtagataactctatgcaacttccaccaatttgatgtgtccctctgtgaattataatattcatagcattttcccctttactatttatttaatgcttaatcataacctttaaatgaaggattattaactttctgtttgcacatatgaatcattattttcttttcttaaattaatactatctaaagccgctcctaatatagctaatataagtattgataaaaaacaacctttttcttcattaaaaatacctccaagtctttaatttaatacttaaaatcccccgtttgtccaacttcaaaatgcaactttgaaatatcttcttcatttccacaataaatctgattttcaaagtaaagatacttttctaattctcctttatacttacctttttctggataaaacaaataatccaaaacgttattatgacaattaatacgatgaacaacaagtaatctaggagaagaaaagtcttcattcgcataaaaacctttatacagatgatcttcagtaaatccttcaaattcttttaaaatatcaataaactttgtaacttctaaaatgtttttattatcatttgcttcttcttgaaaacaaaacattgctaaaaagtaacggcttgcatacatatgtctatcttctttggtaataatatgtttagggtatccatcatttggtatcaatccatctgtaccttctttgtgatttaattgttcaaccagtttctctaatgcgtcatcaatattttctccctcaatttcatataatttatccttgagaacgctaaaactcttatctttaaaattcagctctaaataacgcctaacaaagtgatattgtttcttagagtagttttctgattttttcataaaattcaactccctcatattcattttaattacttttgcagactttggttattttcgaaaattaaatcataataaaataaatccatatgtatttttaattctattaaaatagtttctagacttattaatttttcaaagatcaaaattatcgtcttattgcttaaaacgattcgttgtaattccttcttcattttctattttaacattccactttatccacaaaagcacaatagtatgtcactaagtaagaatcaaaaaaattcacaggacactatgcatttagtcccatgaatttttatttaattggctatatttttaatttcaatttatgtatcgattattattttataggataaataatttttctataagtaattccattactagatgcatttaaaagtttaataacaccttctgttataagtgggtgaatcttactcacaaggaaaaatgcattcacatcaactccttttattttatcagaatattcccactcaataattccatcaattgcatccttaattatggaagcataaaaaaaggtttcagatattatcccgactttaacattgctttcagcttttagctcaaaaatattaaagcttttatattccacaccttcactatacaaatcaatagcacttttacctcctgtaaagatataattttttcgttccactttatcatggaataatcctacaggaagttgatttttaatttctttaatttctatatcatattcttttatttttgatattagtttattacttccatttcctttaaaatattcttcgagatgtttttccaatttcaaatctaattctttactaatctgattaggtctattatcagaagatttatttagtattaatttagtccatccttgagtttttattaaatcttcccatcggttttgatcttctaaatttgctatcctaaaccaatccccatattgttttttaaaatgatataatcggaaaataaatctattaaaatgtctccatttacacttatttttttctatgggctcataacttttatcccaatctaagattacacagtcaataaaatctggtaaattagctttacaaactaatgcccacgcttcaaatgctgcatcatcttcttgtaagtttttcacaatgccctctttcatttgcaacttaagtattttttcctcttcataatactcgaatttaataccacttggaaatttaatagatttattattgcacctttttctaagttcttctaataatccctttaattctatcataattatctcgcttcccttatttcaatattttctatattatatttgttgataatttaaattctcaatattttttctctgtatatacattcaagatcagcttgaagtccttctaatccatatggaatttcgacagcatagcatccttcaaaagaatcatattctacattatatccaatcctttttaattccttaaaatctctccacattgttctggtacttaaattaggaaatctctttttataccaacttatacaagtttccttatcttcagatttattaaaatattgttgcacttcagtataattttctaattctaacataatagttgttaatcgaattaatttttcatagctcctatttttcgctttgctatttaaagaaactagaggcggaaaaggacattgagtattaacatcattatgtatataaccattttcttttttagaaaagctaatatttataagtccagcattttgcaaatcctttatatctctaagtattgttttctcactagttttattaattatatttattaaacttgaaagctctccaatttctacaactttactatatgaaaaaatatgaaatatagctagttgacgaattactttaaaacccgttcttttttctttcactattttgtcatccataacttaacctcccctacttttattgtatttttattctatcatattcaatagaggactttaggacaacagtttgtcttgttcataatcatttatctaaacattctagaaattcattagaaagctcatatagaaacttacgtatatcgctaagagaaccttcaaatcgttcatgataaaacgaatagccatctaatagataaacaaaaatttcagagttaaaataaaaatcctcagtttctcccaataaatatgatgaaataaactcaataaatgattctgttaaatctttaggaatgtattgttcatagtaagtataattagttaagatttttatagctacctttcttcttatatcagattcaacaatccaagaaatatcaaccaatgttttctctctttttttcatagtactttctctaaaaaaactataagcttttataaatttttttactacctgatcattaatatctttaatatcagattctttatttatatgtttacgttttataaaactatctccatagagtaaaataggaatatcaaccttatcaataattatagactcatatttctttgcaacatctaaattttccttattagtatatttaaatggatatgatacaattccagttgtaatattagctgtttttcttgaaatctctaatatttcacacgctaattgattgcttatttcatcacctaagtcaaatataattattatttctctatttcttattaataatttttctattttcttttgagtttcgctattcaaactattaacttcacctgtttttattagtattttttctttagataacgattttataagattctcttctaagtaatctactgcagcataattacaataattataatctaactctattattctatctaacctcaaaaggcctaattcccctatacctattaacaatagctcattttttctttccatgtgtcccccccaattattcgattaattcaattttaaatatactatgattatccataaaaaattcaaataacttctacgatatacaacatacagttataaatcaaacctatctgtacatcatattgtatactatactccaatatttaagcagtcaaagttaactcctcgtggtgaggataagttttctaattttatatttattttctattataatacattaaattacaatactctatataataatataattttttacctacattgtatttcccaaaaatgatacatagtttttagaaaataaacttaatcaccaacatatcattgtccccttaaccccctacatttccatatgcatttctaacctcaaatacaaatttgaaacatttaataaatcaacgcattaaatagtttatcatcaaattctgtgagcaaaaattcctgagcctttataacttttattatttcatcaactatttgcttatattgttctatacttacattcccagttttaatctcaaatttatttctactaaatactgcacacccaaagcaaaaaaagcacaccctcaattcaaacttcatagaggtgtgcatttatttcattcataggtaaaaaaatatacatctaaaatcaaatttactacacacctaatttattcctctctaatctttcttcctatgaaatctatccccttttgaaataccatggtctttatattaattttagtttctccactaggtacagtatacttttgttccaatatgcgaaaataaccagaatctacaaactgctgataaggaatattatttttatccaaaacttttttatctctaagtagagaaaacagcctatttcttcccatgcctctaattccaagaacctttgcaacatatcccatttctatgctatccttagcgcctgcaacatcatcatagaattgtcctttaggttctagtaattttactttcctttcagcttcaacccttgattttctctcttcttttagcttggtagctgcagcaataagtaaatctggattatctaataattcatccgtagcatacatccctgttttccttatgcaaggtaatacctcatcaaaaatccatgcttcaaacttctctgcacctggtaattcagattttgctgccattctataaatatcaccctctggaatgatactcatttctacaatttggatagcatctgttccatccttcctttttccagttactacccctactccgtgtttcacggccccactgcaatgccttgtaattgcatcattaggcttcttatatcccaatgcttttgctatatcaattccaactgcataatccttattattaagcttcacccatcttatttctccaaatctttcatttttgaaaattagtaaacctcccattttgcttataccctttcctaagaattttatctttttaatacttcaataatataaaatattcattccatattaacttattttataatctttagatttggcttattagcttcttttttataatcttcactgaactcattaataaaataatcaaaattgcatttgacatacaataaaccctttctttcattccagcttaaagcatatatcttatttattctgatttttgtatcttgattatatattgtccatccctctctccacataccaactggtggaatatcactatataaattgaaaggtatattttgatctaaatttcttatacaacctttttcattcatactaaaataaagacatccatcttcatttctgttcgtgctttttccctgacattctccaccatgcttataattcctcttgcaatatgcgcattccaggcggttaggtaactctttcggcctgttcattctaattctgtcctaaagtctttctgcagccactacaaacaagtacattattaaattcacttacatctttatcacttccacaaaatatacatcccttactgtatttcctcaaaactatatcattattaaccttagttatttcgattggatccccttcattaatacctaacacttttcttatttcctttggtattacaacccttcccaagttatcaagatttcttactatccctgatgctttcatttaaacaacttcccttcataatttagctttgtttaattctcaaaaaattcattttcatgcgaaatttactctgtaattgtttattgtgaattgtgcagtgtgcattgtaaatttacttaagcctataattattcctaatatccttctcaatttctaccacataatcttttgacatttcatatattcttgaagaaaccccctcatcaaaagctaatagtctatcaatagaaaattcgctgctgactattataggcagaaaattaaggtacctataattaatgatttcaaacataatattcacgtcggtttcattgacctttcctttaaagaggtcatcaatcaaaaggacctcgcataattgatactttgaaattgtcctagtataatattcttcatcaatcatgttttgttttatctttgtgattacatcacgataaggcatgtacactactttaatcctttgttttaaaaagtttaatgcaacagcaatactgcagtgcgttttaccgctaccaacctgaccgcataataaaatgctattgcgcctattgtttctaatttcatcaaaatcagtacaataagctgcagcagtatccttcatcctttgggacgcctgattccacactacaaaactagaaaaagtaagtttactttgttcaacattgattcctgaatacttccactcactttttagcttttctattttcctgcattcacaagctacagcaagaggctgcatgtgttcctgcttaataagtatccatccggtatcgcagcatttgttacacctatatgaggtttgcttcaatcctctttctttcagcttctgtaagttttcgtggttcctttggcttgaatcctgcaaattcatttttatctgctgtgttactctttccagtacttctaaacccatttttctttacctccatatgatcttctggatacccatctctcctccagttttttagcactccaattgcatactttatgtcaggacaatttttctcaaaaccaacatccatagccatcttaaccaacttttctccatggatatcaatagctgatctaagtgcaacataatcgcaccctcctggttttcctgttattttttcatgatactgcataagctcaattgctttaagatttatatcatcctctgctacagattcacttttagtattattatgttgctcaaagagacttgactgacttacatcttcatcacaagtattctttttactctctatatttttatctttatctatctcttttttcttattctttttcttattctctatctctttcttattctgttgcgttactgtaacgttacttttattttgcgtaacgttactagtatttttagtaacaatacagttattatcagcagtttctataatgctattgctgatatcttcattattattagcaatttccgaacttatatcactagctgcttcatcagtatcagtatttgcataagcttcttccctcgtttctaaattctctaatggttcatttttatcaagagctttattctcttctgagatatcattatcttttgaatttttcttttcttttaaatctctagcttcttctaattcctcattttcatttagatctatgctttcttctgaagcttcactttcataactttcttgaacatcacttttactaaccttcttctcccattttttcttttctctatgagtctcagctctttttctattttgctcacgaactttttccattccttctatattttgatacttatcccagtttacaattctgattactttattaggagatatttcaatcattccaaatttagatagaactcttaatgcaagtttaatggcttctaatggtcgtgaaaataatatggctagcattttgctagtaagtggctttccttctgataaaaatatttcaccattagcattaagctttccacctagtaaaagtattcttatccacacataatggattgtatccctttctttcattgcatctattaatttcattttttcatcatcaggcatacaagtagctaatttaatccatttaatatctgccattatttttcacgctcccataaataaaattttctaaatctttcaagtccatcccaggatggatctattccaattgaattacaaacatatacataacattttaagattttaaaattcacccttctccctcatttagtaatacctcattttattagaattcccttatgtgcctttccccttttccccttttcaaagtcataataaatacactcttcaagttgcttaaccggaaaattttctcctagcatttggatgcatacttttgtatccctttgataattctttaatatttctactaaatcattagctgttagtccttcaaattttctaatcaatttaaattccttctttctaaaatcgttaactatatccataaaaatgaatttattcttttattcatttctatcaaaagttaattctttaatatcctctaagttagataaatctttcccattgttttcttctaaaaacttcattaattctgttctggttatctttagacttccaagctttaatcctcgtagcacattattccttaatagatcatacacagaatttctattaacttttaataactctgctgcttcagatacagtatataaaactggctccatcattatccccctattctcatctcaacaattcatccctcacaaatttacttcacattacaagtgttatttcactcccacttaacaaaaagatcatatctataattttctacttaacattaagtatttctatcagttttcatattgttaaattcatcaataataaatagttcttctattgttttcccaaaaaatttcgaaataaatttagcctctgttacactaaaatcagatttaccatttattttgtaatttaaagcacttccagttattttaagtttttcagctaattcctgttgagtaattcttttctctaccataaggccttttaatttgctatacatccctcattctccttttttaattattcactataaactaattattattttaattttcaaaatgataatcagaatatatgcattatcattttgctaatttagttttattataaattagcatttagataatttcaacatattttacttaatttaataaattttattttttcttttagttaattcgatgtttattaattagcaaatagtttataatataggttagtgaattgcatatagtgtataggggggtgataatatgagtaaatttcctattaggcttaaagaacttcgtgaagaaaaagggttattaggtaaagactttgctaaaattatgagcgtggaacctgcaacagtaaccaattgggaaaaaggaaatagatttcctaaggatgatgtattaattaaaattgctgactattttgactgcagcactgattatcttctaggccgaactgatgataaactttcaaaagtatactctgggacattgcataatcaaactatagaaattgaaatcgataaaggatttcctcatgaactaactgctgaagaggttcaaaacataattaagcagttagatgccgtgggtttagatgtgaacaaactaattgaaaactctaaaaagaaataaagtacaaagaaaaactgtagaaactatctatagttttttatttcttttttatactatttttgagtttaatgtattaaatatttatgccttctcctaaaaaatcaaaaaaccattccaaaatattgaaattaattttacataatgttataattttccttagaacaagagttcgctttatgttagggggagattttaatgttgtggaaatatattttaaagataaggctcaataatgaaatcgtttatatgagagatattaataaaaatgagaattgcttatcaaataaagataaaaatttattggataaaaatactatagattgtgaaatactaactaacatggaggtgtcaaaacatgcaaggaagcattcgtaaaaaaggaaaaaactattatattaggtattacgatgatatcgatggactaaaaaagcaagttgaaaaagtggttggtccatcctatgacgaagccgaaaaaaaattaaatgaaataatatataaacaaaataatggatatataagctcaaatatgtctttaaaagcttatttaaatatgtggctagaagattatgttaaagaagagcgctctgaaagaacttacataatatatagagatactatgttaaaacatgtaattccgtgcattggtaatgttaaacttagtgatcttaaggttgttcatgtagagaaatacctgagggaattgagaaaaattaaaaataataatggaagtactattcagctaaatttcaggaacttaaaaaccgcattaaacaaagctgtaaaactacaattactaaatgataatccctgtcgatttgtcgaaatgcctaaaaaaaataactttaagggaaattatttaacagcagaggaattcaacttaatatataacagcctaaatgcaactacttatttaggtttatcttttcgagtattattagacttagcagttgaaacaggctgcaggcgtggagaaatgtgtggaacagaatggcgtaatattgactttgataataaaacaattacttttgataaagcattaataaaaggtgaacacggatggaaaataggaagattgaaaactgaaacatcttatagagctctcccactttcagatgatttaattaatcaactaaagaaattgcgaattaaacaactagaaaacaaattaacatttggctctgaatatcatcttaacagttttgatggtattgaatatgatcttatttgcattcaacgaaatggtaaatttatggtaccaaatgatgttagagatagattaaaatacttactaaaaagaaataaaatagataaaaatatacgatggcacgatcttagacatacttctgctactctacttttagaaaatggtgttgcaatgaaaacgatacaaaaaagactgggtcatgcttcaatgtcaacaacctctgatatttattcacacgtaacagaaaaaatggatagagaagcaactaatatattaagtagaactattaaacaaatataatgcttatttaaaacaataacaaatcaaaatataatttaaatttactattactatttcaatacatttttaattaattaccaattatatattcgtctctaatcaaaaatatatattgaattatggacttattatttttttgcccataacaagggaaaatacaagggaaaattcgaaaaactcgaaattttcccttgtatttttttccataaaaacttacacaatttcctctatagtaattacattttcaaggctatgaagctttaaaatgtactctgaatgattaattttttcaggtaatgttaaagtcattctaagcccaattatatgattgtcaagctctttagctttcttaagttctagattagaaatttttgttccatctagttttattgcattcataaagttcgtaacgcctgctatatgcttgagttcagcatatacatccaattcgttagacttagccctataatgtaaatctgctttatgaagtactgttaatacacctaataagaaaaagcatgaaataatagcgccttcataaaaaccaattccaatggcaagtcccatacatgcgcaggcccaaagaccagctgcagttgtaaggcctttaacttcattacgcccaactacgataatagtacctgctcctaggaatccaataccacttataacttgagcacccattctgcttacatcatcctgaatgtgtaatatatctctcatgtattgccctgttatcataattaaagttgcaccaatacaaactaatatatgagttctaagaccagccggccttttttttcttcctctttcaagcccaataatccctgcacaaatagtagcaagagtaagccttaaaattatagatgcagtattaacttcccttaagtagtttgtcagttcatttattgtattctccatataaccaccttcataattgctggtatcttattgttaattataattaaataattctaaaatttcactttcatttaacgaatgtatgaattctcctacggataaatcatcacctaaaatcttatttattagctctcttttggaatcctgtaattccactattttttcttctatagttccttgggcaattaacttaatcacttctactacatttttttgaccaattctatgtgctctatcagttgcttgatcttcaactgcaggattccaccatggatcaaaatgtattactatatccgcacttgttaaattcagacctgtaccaccagcctttaaggataccaggaatacggtattttcaccattattaaattcgtcaaccatcttcattctattgattgatgaaactgatccatctaaatatgaaaataagaaatttttttctttaagtattttgcttatattctttaatacagaagtaaattgcgagaatactaatattttatgtccctcatctatactttgttccaataattcaattaatgcatcaatttttccactacttcctaagtaattatccatagttacagacggatctaaacatatctgacgaagcttagttatataagccaaaatttctattttgctcttactaaactcaaaatcttcgactttcttttgtattaaatctttagtatagttagcataggtttcataaacaactttttgctcaacacttaaaggaacaagaagtcttttttctattttatcaggtaattctttaattacatttttcttatatcttctaagaataaatggttttacaagcctatttaactcttcaagaatttctggtccttcttcaagccttctatgatatctagtcacaaatttcttctcgttatataaataccccggcattataaaatcaaatattgaccataattccatcaatgaattttctattggtgttccagtcaacgcaaatcttattcttgattttatttccttgactgacttagcacttaaagaagattgattctttatattttgagcttcatctaagatacagtaatcaaaattcatattatataattctatgtcacgtcttaataaattataggtagttaatattacatcatattctttataattattaatcaattcttctctttcttcttttaccccattgcagattgcaattttcattgatggagcaaatttattaaattcatttttccaattatagattaaagaagtaggtgcaataataagagtttttgaatctggctttgaaagcaataatgttattgtttgtagtgtctttccaagtcccatttcatcaccaagtattccaccaaaacctaagtaatctaaagttctaagccaattatagccttctttttgatactttctaagtttagcttgaaggccatatggaggttgaaaggctttatccttaatgttgcttaatctttctttaagatccttaatttcatcacagctatttatataccttaactctttgtcttctaaataatcttcaagataagctcccttgttaattggaacattaatgagattctcatttaatttttcttctaaaagtaaattatctataagggtcaatgattctttcaatgcctcatcttctaggtctaagaattctccattctcaagcttgtaatatttcaagttatctctaaagcttctaagtatttttgcagtttcttctggagatatatcagaaattttaaattcaaactcaaaatagttgaatttaccttttctaacttccccaacaaaatctgatttcttaatatcttttattcccttaaatctctcagaataaaatacttcaccatatctttggagcttttctatatcatatttaaagaatttaaaagcctcatcatcatcttttaaaaagaataatcttccattgacttcttcaaacccaagactttttaatactcctaaaacttcatattctttattagtatctctgtaaataattttatctttgtattcttcaaaaaaattaaattcatgtccttcatatgataccttaaacaataatgaaatatccttatctttatcaaaataaaacctgaagattacgggcgcgattacaactttttctctaatatccttagataaaactaaatcatttgttactttttgaatcgaaggtattaattctttcaaaattctactttcattgattttattgaaactaactttattagtagcattaaatatttttaaatacggcgataatctctcacattgttctattgatggaatgtatattgaagtaccaaataagaatacatcttcatcttgagttaatgattctggtattccattaggagcttctaaaattatattgttatttttgctcaataaagcaagtggaataggcatatccccttctattatttcagattctaatattctataaaagaatccatcgcctaaaaaaactctattcttttttataatgtataaaaattctttaaacatcatatcaggaattgtaagagtctttccttctattaacttatcctgataacgtctaaaatttctatcatgatctgctaagttttttatattattcatgaattttattaatcttctatcttcatacgaaagactttgagtttttatatcaaaaataaattcttttccgtacttaattggtactttattataaacgcatgttaaaaattgattaatatctttaactatatacatcttattgctttttcttaaccctattttaaactcaatttgaagtttagaggaccaattgtttttattaataataacttcgaattttagcttctctttatccgtatctccaacaagtaaagataataaatcatcattagaattctccttaattctaactttattatttttaacagataaattattatttaacttagttcttaactcttcatcctcatcaatatttcttaagaacgtataaaaagtagctattatatgtttacaacagtaattatcacgagaaaattcgtttttctcaaagtctagacaactacaatgagtccctataatttctttagtcatattatcaatttcaagcttacacgaatattcacttagaaggctttctgaaactacatttgagtttatttttatataatctttatctactttaacatttatttctcttaacaaatcatttttcagaacacgttgaccttttgtaagagatgaatttgttatattcttattaaaaccctctagtaaaatttgttttatcaatgtttatcacctgcatttttatttttaacttctttaattcttttaattaaatctacactgatatattgggattttgaaaccccttttctaaaatatcttatttgcttatagtcacggccttcaatatttatatctaatatatcaattctttcagcattaaatatagtaggttcattttttccttttaaatatatatgtatttccatttcattaggtgagattatttaaattagtaatttaaaaataatcccatatcctccttttaaaattatatttagttattatttttgaattcttcaattgcttcagcgatttcatttagatattcccatcgctcatatttattatctagttcactttgtacttcttctttttcatgcatcaattcatttagtttcccatagtttgaagcattctttgccatttccttttctaaagagttgattttttcttcgagcttagcaatatcttcatctatagtttcatattctttttgctctttaaaagtaaacttaggtttattatctttagttttttctttaaatccctttcctttatctgctgcaaattcattgccacttttatcatttgactcaacagatttaatcttctcaatttcttttgaaatcaaaaagtcgctatagttaccgttatactccttgatatacccatttccttcataagagaatatcttcgtacaaattctatctaagaaatatctatcatgggatacaacaatgattacacccataaatttatctaaaaagtcttctaatatttttaatgtttcgatatctaaatcgttagtaggctcatctagtattaaaaagttaggtgattccattaatactcttaaaagatgaagtcttcttctttccccaccagataatttttcaatcggagtatactgcatagtgctatcgaatagaaatctttcacacatagtagaagccattattttagtcccatcttctacaggtatgtattctccaccttctttaacataatcaattactcttagcttaggatccatattgctgttgtcttgtgcaaagcaccctatcttaactgtatcaccaatttcaatttttccactatctataggaagtctgcctctaagaatattaactaaagttgtttttccagccccattttctccaatgataccaattctatcatttctcaaaaatatataattaaagtctttgattataactttacttccgaatgacttagagatatcgtataattcaactactttttttccaagcctagaaccaacaaatgatatatctacatcttcccgtcttttaatgctttcttcgcttactaactcgtcaaatctttgaagtcttgccttttgcttagtagttctggctttagcaccgcgtctaacccattttaattcgtttcttataagagcgtttttcttttcttcttgcgattgttctacttcaattctttcaatcttcttttcaaggaaagcagtataatttccaggataagtatataaatttcctctgtccaattcaataattctatttgtaactctgtctaagaaatatctatcatgagtaatcatcaaaagagcgcctttcctagaatttaggaattcttcaagccattcaatggaatctgaatctagatgattggtaggctcatctaatataagaagatcacatggtgttataagtgaacaagcaagtgctattctcttcttttgtcctccagataagtttccaaccttttctgaataattctttattccaagtttatttaaaattgtctttgcttcactttccatatcccataagcttaaggaatcaatttcactttgaaccttaagtaattcattatttaaagaatcaaagttttcaccattgcaactattaatcttatctaataactcctcatatctttttaaaagtttcatttctttagtgtcacctttaaaaatttgttctaaaacagttgcatcttcatcaaataaaggattctgatcaagatattcaattctaacatttttaccctttactatatttccatcgaaaaattcctctcggccagaaacaacttttaaaaatgttgatttaccagcaccatttattccaattaaaccaattttatctccatcattaattcctagtgaaacattatttaataatattttatcactataattcttgcttatattttccaaagtaattatattcattaattttaaactcctttatgtgattatatacatactattttaacataggatgctcataaacagaaatttagattgaatttaaacaaaaaaagactacctatataatatagatagtctaaaagtaacatatcttgtttcaaataattactgtatatattaatgattcatttattttttttaagattttgacttgagatttcatatctttcttcattatcttctgtattataaaaagcattacaaccaatcaataaagcacaaacaaaaattactattcctagcataattattccccctttaatatggatctgattatatatttattataacacagtccgtatgtaaacgatatactattttacttttttttatttctatttacatcaatttcttaattattgttttcataattattaattttgcagaattttcaaaaaattattgacaatgcttatagctttttactataatttatacaaacctatataatttaaaaactgtgaagaggaagagtacatatattactgaaataaagagagagaataattgctggaaattctcatgatgtatatatggaatgtagccttggagtttttaatcgaaatcttaattgttagagagtagaattaaacggattgtctaccgttaaaaggacaataatatcggttctttaacccgtattattaataagtgtgtatttgattatacaaaattaggtggtaccgcggtgattatctcttcgtcctataatatttataggattgggagtttttttttacacaaaataatatttaatcttatatcaagtaatcaaaaagtaataaaatcgaacttttatttaatcaataaatgataatgaaatattctaagatatttatgtaaggagtgatttctttgaaatataatggtgctgaaatagttattaaattattagagaacgaaggagtagaatatatatcaggcattccaggaggatttaatctcccactttatgatgctttatataaaagcaaaaaaatcaaacatatattagcccgtcacgaacaaggcgctggatttattgcacaaggcatttcaagaagtacaaataaagttggggtatgctttgcaacttctggccctggagtaactaatcttttaactgctattgcagatgctaaacttgattcaattcctcttgttgctataacaggtcaggttcctctatcagcaataggtactgatgcctttcaagaagttgatgcttatggattaacaattccaattactaaacacaatttcttaattaggaacatacatgaactttttacagttataaaagaagctttcaaaatagctttagaaggaagacctggaccagtgcttgttgatattcctaagaatattcagaatgaatttatagacttagaagactttccttctgaaattgcatctgaaaatctaccaaaaagagagcaaataaaaagctctacgctttattgcatagctgaattaatcaatgcttcaaagaagcctataatttatgcaggtggaggtgtagttaattcaaacgcttcatccaacttatataaaattgcaaagaaaaataatataccagtttctttaagtcttatgggacttggtgcttttccttgtgatgatgaattgagtattggaatgcttggaatgcatggcgcaccatatacaaattatcttctaaacgaagctgacttaattttggccctaggagtaaggtttgatgatagagctacaggtaatatagaaaagttttgtcctaatgcttctataattcatattgatattgatccatctgaaataaataaagttaaaaccagtagtttatctatgatcgcaaatgttgatgacttcttagaagatatacttccacatattgaaagtaaaggtcgaaatacttggagggaaagagttaaatgctttaaatctaaatatccactcccttcttataaaaacatactgcatcctgctaatataattccttttgtaggaaacatagttcctagtgatgcagttattactactgatgttgggcagcatcaaatgtgggtagctcaaagatacccttttaaattaccaaaggctttactaacttctagtggtcttggaactatgggatttggacttccagtagctataggtgctgcattggccaataaagataagactataatttcattctgtggtgatggatctattttaatgaatattcaggaactagctacccttgctgactttaatttgaatataaaagtaattattttgaataatcatcatttaggactagtacgtcagcagcaacagttgttttataatgaacactatatagcatcaaaatttatatcaaaccctaacttcaaaatgatagcagaaggctttggaatacaatcttgtgatttaggtaatgaggaaaaacctttagaaaaattaaaagaattgttaactgttgagggaccttgtgtaataaatatacctattgaggaaactgaaaatgtacttccaatggttcctcctggtaaatcaaatatagatatgattggtggtgaaaatttaaatgattaatactaatttttatcttatagagctacatgttagaaaccattctggtgttatgagccacataactgggctttttgcaagacgagcatttaatttagaaggaattttatgtgcacaaataggtgatggttctacaagcaaaatgtatttacttgttaaaaatgattctgtgcttgatcaaataataaagcaactagaaaaactctatgatgttattgaagtttcagtacaccaagattatgatcagtctgtatttgaaaacttaaataaagtactaaaacttaaacaagaggatatttgagatttgattctataacttaagcttagaatagtaaataaaacttagttttaattcagaaataaaaataaggataataaacaatatctctactgtttattatccttattaaatgaaccgctctataagaaagtttgtaattatcttgggagtataatgttagcattgtgtaaattaatattaacatagttttaaaatttatacaagactatttttatctgctttatatactatttaaaaaagatattatataaaaagctaatgtacataaacattagcttttaaatcttaggttatatattaactaatttagttcttctatttctattttaattaaatgaacctaataaatacataccccaaaaaataaaaatagctactaatatttaatttattcacctattaattcatttttaacatattcattaatattttcttcttcgccttcaaatatttctgtcaaatgtaatattatctcttgttcatcttcaggaagatattttattgtttctttgattgtatctacatttacatctttcataaaataaaatcaccgccttaatattgttttatttctaaatctcttagtacagctttttcatgtttatatgttactataaatctctgtttattatctttagattatgttaataattccttaatataatattacaaagtgttaaaagttaagttagctcaaaattagggataaacttattatgcaaatagccattgtattttctcatttgacattataacttattttcttgtaaattattgtctttatgtgaaaacaacttcaagtttatatcacttgtttttctacatatttattcatataacgtgcttgttcgaaaataagtaagatataaactaatatataagaaacatttatttaattattcaataaaacattaaaattatttaaataaagataaataattgattatataattaaattgaatactctcatgtttgttgctgttttctaaatatgataagaaaatatcacaaactcgattatagagacattgatattttcactacataaatttatattaaatattagttgttcattttacttaatttaaatggttttgctatattgatttctttgttttttaataactttaaacccatatagctaataaacactatggtgtagctgcttaaccttacccaatctatttccttttcatttaaaagtatcagtaaaatatgaagatatgctaaaaagtaaaacaaatacgcccatctttgaatcctcttccattgcttcccttgcattttacgtcttattttcttaaatgaggttataaataatggtatcattataataaatccaatgagtccaactgctatatagcttaggtataatacaggaaacgaaccttcattaatgattttaggaagcttgagtattataaatcgaataaaatatactattccatgaggtaacagcatgattgcacctataattgctaattctgctctaatgctgcgtaatttctttgttattgtccatttttgatttaaagctcctgcatacattactaatataaaaaatgatactgatatcaatcctcttattgaagttttttcaagggttagaataactccttcaagctttgcgttagatgttattcgtagtatttcataaaatgatgtaattatcgcaatacccgttgccagcgaataataaagataataatgcttcttaatagatgatgttaaaagtaatgataaaatagttactagaattaatgtacaaataaagatcatatttctactccttataattattattgataatgaatatcactaacaattatattttatcatggctatcacgtcaagatttagcaatctttattttatctaattgctaagaaataaagttgaatgaatttataatcatttttcttgtatattgctttaagattggtatatgttggtcatcattacattgaaaaagggataaccataattattatagttatcccttaatcttatttcctatataacttatattattctaccattcagcttttgttccatcataatttctccaatttggattagaacagttaatacattccatggcaacttcctttactttattctcatcaataataagtcctagacctggttttgttggtaagtcttcaaaaccgtctttatattgaataaggccttgctattaagtgaacactatgtctaaagaaatatgttttatttactagaagcataaaaaagatatctctaattaacagaactttaatgatgggagaatataaataatgtttttaaaagttgaaaatttaagaaaaagctataatacgggtgatataactactactgtcttaaaaggcaccgatataagtttagataaaagtgagataggagtaatactagggccttctggttctggaaaatcaacacttcttaatattataggaggaattgacagatgcgattcaggtattgtttcagttgataacatagacattactaaactaaatgataatcagcttacagattataggcgagaaaatatcggattcatatttcagttttataacctaatacctaatcttactgtaggtgaaaatatagaagttgtttcaaatataagcaaatcaccgcttaacattgacgaggtactgaaagctgtggatatgcttgataaaaagcatagatttccaagggaacttagtggtggtgagcagcaaagagtttccattgcaagagctatagttaaaaatcctactcttttgctatgcgatgaaccaacaggtgctctagatttttcaacctcaagggaaatcttaaagcttcttcaaaaggtaaacaaagagtttggaacgactatacttatgataactcataacactgcaattagtgctatggctaacaaggtttatagagttagaagcggcgaaattgttgagagtacagttaacaacattgctatgcctgcagaaaggattgagtggtaatgattattaataaaaaaatcaaaagaaccatgtttgaaagtaaatcacaatacattggctcattagtacttattgttttcagctgtcttctttttacaatgtttaatttggtttcaaggaatcttacaaaactatcttcttccttcgaaaaagattataagcaagaagatgctagttttatcgccactccaagaataaataacattgaaggtcttgaaacaaaatttaatatgagtatcgaggaaacaaagtcatttgactacttgctatcagaagataaaaccctaagaatattcagtgaaaataataaggttaatattcctgctataattcaaggaaaagctctaaatagcggtgaaattctcatagatccctcatatggaaaagccaataaattagatattggagacagcatagaaattaatgataggaattttataatatcaggttttatgtctcttcctaactatatctatcccttaaagagcgaatcagacataatgaatgatccaagcagctttggagtagctgttataagtaaagaggactttagtattttaaataaaggcaatgtttcttattcaataagatttaatggcgctagaagtaatatagatagcaagatatcagagtttaaagattatctaagaaatgaaaatattattcttataagttggatgaacacaagtgataatccaagagttacgtattttacagcaaagctttctggtattgatacgatgagttcttctatgcctatagttgtacttcttttaacatgcatattaactggaattgttatgtatagaatgttaaagagagaagctgttattatcggaaccctttatgccttgggttatagaaagaacgagattatgaagcactatcttctataccccatagtcgtttcacttgtaggcggtattctaggaacactccttggattactaaccttaagacctatgatgaactattatgttttattctttaatattccagtaggttctttaacatatgatataagctatattatagtaagcattttactgccaatattcttcttattaatctgcagttactttgtagttaataaatccctaaaaaattcaccaatccagctaatgcgaggtggggctgaaaagaataaggttggtttcttagaaagaaaagtaaaccttgaaagattgaattttaatactaaatttaaaatacgtgagctcctaagaagcatacctagaagcatatttctgttacttggcatagttatgtcaacaatgctgctactcatgggctttgcatctaagagctcaattgactccttacttaaagaatcttttaatgaagcatttaagtataattatcattatgtatttaactctatccaaaatggtgagccagaaaaaggagaacccttcttggaaatcccatttgcaatgaaatatgatgataaaactacttttacagtatatggtgtgagtccagattctaaatatatttcctttaaggataaatcaggtaatacattgaaaccagatagaatcatcgttacaagacctttagctgataagcttaatatatcgccaaaagacacattaaaagtaattaatagattggattcaaaagaatacagcataacaattgatagcattgcagaaacatttgtaggacaatacgtttatatgccgctagatacacttaataatatgcttggtttcccttctggaagttatattggattatggagcacagaaaaaatagacattccagaaaataaactcttaacagttgtaactgttgatgatatgaaaaaagcctttgatacaatgacaaaaccacttcaagcaataatcggaagtatagcttccatatcatttataatcgggcttatcgtaatatatgttgttacttctctaactatagaggaaaataaagataatatttctcttttaaaggttttaggttatagaaaaaaagagatttactcattaattttaaatagttctaggtttatagtggtacttggttacatactaggagtacctctcctacttggttccttaactgcactatttaaatcaatgacaaaagaaatgagcatatctttccctgtaacacttgattatatctatattataattggtttcgtaataatatacttaacctttgaattatcaaaattactaagcagaaaaaagataaacaaaatttcaatgtctgaagcattgaaatctagagtagaataaacataacaatatgcttttttatatagtataggttatcaaatgataagatggtctgttatgcagtttctagaaagataattataaaattctagtaaatgattaacagaccatctctaaatgcacgaaaggaatctcatagcaaacaaagataggaacaacttttttcattaaataaatattaacagttattactcttaactattagtataaatggcatgctacaatatgatcagttcctatttccttttctattggatgaactttactgcatattggttttgcgtatggacacctagtatggaatctacaaccagaaggtatattcattggacttggtatatctcctttaataatatttaaatttgattgtctcgcttttataggatcagctataggtatagatgacaaaagccctttagtatatggatgaagtggatttttatataagtcatcacttttacctacttctacaatactccctaagtacataactccaattctatcagaaatatgctttaccatggataagtcatgtgctacaaaaagataagtcaatcccatttctttttgcaaatcttcaagcatattgacaacttgagcttgtattgatacatctagggctgatattggttcatcacataatacaaagtctggattggtcgatattgctcttgcaattccaattctttgacactgccctccactaaattcatgcgggaatttatccatatcatctttcttcaaaccaaccatttcaagaagattttcaattttttcttttctttctgatttatttaatccagtgtgtaaagttaacggctcttcaattagttcttttacattcatgtatggattaagtgaggaatatggatcttgaaaaattgtttgtatctttttataatattgtttcatttgtttttttcttagtttggcaatattattttcttcaaagaatatatcgccagatgttacatcataaagtcttgttattgttcttcctaaagtagattttccgcacccggactcaccaactaatccaaaagtttcccctcttcttatataaaaagaaactccatccacagcttttataaaattatttttagtaattccatttttaactggaaagtatttttttaaatcttttacttctattaatatatcatttttctttcccattctctttctctccttaataaactaataatttgtatcaaataattaataatgcaaaatatccaaatcatttagcaagaagacacatacttctatgggttttactaaaactactatattcaggtattttattaaaacactctgattttgcaaattcgcatctttctgcaaatggacatcccgtcggaggatttaaaagagaaggtgctgaaccttttattggattaagcctggctttttcatcatcttgaacctttggtatagaatttagcaatgcttttgtatatgggtgttttgatgaataaaagatttcttccgttgttccttcttccattattaggcctccatacataactgcaattctattacataagctagctacaactccaagatcatgggttataagaattattgacatgttattcttagttttaagtgattttaaaagttctaatatctgagcttggatagttacatctaaagcagttgttggttcatctgcaattaaaagtttaggattacatgcaagcgccattgcaattaatactctttgcctcatacctccactgaattcatgaggatattgatctattcttttttctggcattggtattcctacatcctttaatacatcaattgccacttttctggcatctcttttgttaattcttttatgcctaactaaaacttctataatgtgatctcctattttctttaatgggtttaatgctgtcataggatcttgaaatatcatagctatttctttacctttaatttttctcatatccttagcagataacttaagtatattattgtcattaaaataaacttctccagaatctatctgtgcatttggaggaagaattctcattacagatttcataagaacactttttccgctcccagattcaccaacaatacctaaaatttctccagattttatttcaatatttacccctcttacagcttctattttattatttttaatgtaaaagttagtttttagatcttttatttttagaagagcttctttactcataatactatttttcacctccaacaactcttggctctacaattgctctaagagtatttccaagcttattaaatgaatatattgttagaattattaatacccctggtaatattgccatatacggagcgttttgcagatttgcttgtgaattttgaagtaaatttccccatgaagacattggttgttgaattccaagacctaaaaaacttaatgaagattcagtcattatagctccagctatacttgttgttgatgcaattataatggttggaaaaacgcttggaataatatgcttaagtattattgtacttgaagattgtccaattgagattgcatataacacatattccctttcctttactgaaagagtttctgcacgaacaagccttgcaatttccatccatgtaaataatcctataacaataattatagcttgtaggcctggtttcaaaaatatactaattacggttactaatataagccaaggtatagaagatattatatctacaaaacgcatcaagagattatctatttttccaccaaaatatccgcttattgttccaactaaaacacctattgaagtagaaattatcattgcaagaactccaactataagtgatactcttcccccatatatagttctagttaaataatctcttccaagttcatcagtaccaaataaatggtttatactaggtgattgtagcatattagctgtatcagttgcatcgggatttataggtattaaaaatgcgaatatcgaaataaatactataaaaattagaaaagccaatgagaatatggaagttttactatttcttatttcatacttaaaattattaattcgtctattttccatataatttacctcattcctcttattcttggatcaactaaactgtacagtatatcagacaataagtttcctaatataaccaatgatgatgataaaattaaaattgccatgataacaggatagtccatacctttaattgcagttataaaatatggtccaactccaggccagccaaaaacagtttcggttatcataccacctgtcacaagcattggcagagcaattcccatctttgtaattattgggagaagaacgtttttgcatacatgtttaaagagtatttccctagtacttcctccgaaggcatcctgaactgttacatagttctgtgatatctggcctattgtcgatgatcttacgtatctaactagttcaggtaaaaaagcagtggttaatacaaagcatggcattataaaatgaactaaaaagtctgaaaatgaatcttccgccccaattgtattcattcctagtatagggaatattgcaagcttgtacccaaatataaaaataattatcatagcaaaccaaaatgttggtactgctatacctattgaacaaaacccatcaatgactttatctataaatttatttttatttgctccagctaacaacccaagaactattgaaattacaacagcaagtaaatatgatggtaaaactagcgccattgtagctggaattcttgttgctaaatcattagctatactttcatggttaactattgaatatccaaattgtccatttaatattcccttaagccataaaaagtattgtacataagctggtttatcaaatccatattttgcttttattaaatttacagtttcttctggcatatttggagttgccattgcatcaattgcattatatggagctaacttaataaatgtaaaacaaattattgaaattattaatagcagtggaactgcttgaataactctttttaatatatatctagccactaaattgtcacttcctttattgataaattacaaatggggaataattatttgttattccccatgagcttaacctgtaataatttttatttaaaatgcaattttgacatatcttcaaaagtatataccggaactaacgcagcatcctttactccatcaacattagagctcataacaagtattctcttattctcaagaattggatagaaatacgcatcattttgaatttgtttttgggcatcattatatatttcttttcttttggcttcatctttttctactcttcctgcattaaacaaatcaacaagtttattatcatcaaaatggctatagttgtgtgaacccggtataaataatgagttaaatgtatctggatctattcccattatatacccaccaaggaacatatcataatcgctatttggatccttcattttttgggtaatagcagcatcctctccacctgaaagttcaacatctattcccactgctttaagattttgttgaataatagctgcttccttctgataaggcacattatttccaacatatccaagtttaagcttaagaccagatactcctgctttagctaagagctccttagctttatcctgattataatcatatttttcaacatcatcagtatgatacttgctttcatttggaaggaaagtatatgcctcctttgcatattcatcagatccaaaggctgcatttatcatgtcctttctatttagagcataaaatatagctttccttacatcttcgttttgaagtttaactgattttgaattcataaccatgtaagctattcttccttcgtcataggtataagaagttaatttatcactttttaaatcctttaaatcactagactgaacaattaatgcatttatttcacccttttgaagtgagagtttagctgtattggcatccggtattgtcttaaatactacattttgtatttgaggtgtaccaaggaaataatcatcattcttgactaacttgacatactgccctgctttatattcctctaatttataaggtccagtacccactggctttgcattcttttcactattttcgaaatttgtttctccttcatatacatgcttaggcattataaaaatatctcctaaaagctccattgctggagcactaacttctggaagaatgaaattaacagtataatcatcaaccttttcgacttttactggttttccattaaatattagctgactatacgcccaaccagcatttttttcatttagcatctcattatatgtgaaaactacgtcatcagctgtaaatttcacaccatcgctccatttaacatcttttcttagctttgccgtatacgttagtttatcttcagatggcgtcatgctttctgcaaggaaatattcaactttatctgaattatacatataaagtggtgaatataatgcttttatttccatcaatccataacgatcacttgtagttattacatttactgaattaccaggatctccatcaatcccatatgtgaatgtatcggattttgaagcactttcctgagttttaacactactgcctgtctttccacatccacttaatatagatattgcagtaattcctacgattaaaatttttgataactttcctattttcacttattttcccccttaaattatgcttataaaatccccttgtaaaattttatgaaaacaactacacgattagaatagcaagctttattgacatatgcttttctttttcatggtgtatccacataattcatatagacttactaggtttatattccgattatatcactcaggattactttgtcaatatatttttacctcttttttcatatgaataaataattttccttagtgattttttactatatatgtgctcaaaaattttgatttagtacgaatttcctaaaaataataaaagcgcatattcatattgaacaatgcgctaatcattatattatatttccatttccttaacattatcagctattattaaatcggcatccgttgttttcactacttcatcaacagttaaacctggtgctacttctattagaactaatcctttatctgtaactttcataactgctttatctgtaattattagattaacacatttggcagccgataaaggcaatgtacatttttttaacacttttggattcccttttttatcattatggcttaatgcagctattacgtatttagctcccactaaaagatccattgcgcctcccataccaggcgaaaaaactccaggtatttgccaatttgcaatatttccttcttgatctacctctaaagcgcctaatgcagttatgtcaacatgtccacctcttattattgcaaatgataaatccatatcaaaggttgatgatcctggtagtaaagtgattggagatccacctgaattagctagatctggatcagattctcctatctttggagttgcgccaaacttcaatgcgccattttcacattgtagtgttatttccattccttttggtaaataattagccgccatattaggtataccaaatcctaaattagcaaccattccttctttaaattcttttgcgattcttcttgcaattatctctttaccattcatcattttcacccctatctcattttattagttcttatccataaatcttcaaaatattttcttctatcttcaaaagaatcaccttgaactattatatctactaatatacccggtgttccaacactatcaggagggatttcaccaacctcaacgatttcatccacttcggctataactaaatcagcagcaagtgccatacttgtatttgttccttttgttgttcctctatatacaatatttccgaacttatcagccttacagcctttaattaatgcaacgtcagcttttatagctggaaatactaaatattcctttccatctacaataagtttatctcttcccttctcgatttctgtaccaagtccagttggtgttataactgcgccaagtcctgctccaccagctcgtatacattcaactatagttcccataggtataaattctacttctaatgtgcctgcattatattgttcttgtgcttcagggcaagtaccaatatgcgcccctacaaatttttttatttgtttatttgctatcagcttaccaacatcatgagtttctcctggttgagctgatacagcttgaataagtgtaagatctttaatatttgtattagctagcgcgtctatcatcttcaatggagcaccaactcctaaaaaaccagctgtcatgatcttcatgccatctctaatattttttactgcttcctgtactgtcttaatctttgtcatttctctatacacctccggatttttataatatgctatcaattattaaagaaaatttatgatttaagaccgattacccctttttgaaacttaattgttataatattattattatttatgaatttatattccaattaaatccaaaaccaaaagcataacatctaataagtttttataaaatatttcacaacatatggaagtgcataagaattactattttcaatttatctaacataatgaattataagtttattaaataattgatttgaatttcaatgagcttttgagtaaaaaaatagatgtgaattagaatgatttttcctaattcacatctatttttataataatcttttaatccactaaacccacatatttgctataaattataaagattccaggtttttcttctcgctttttcataaatgtacattgttaactttttttattcttttattcaaaaaatgtttcatttgaaaacatttttccttaaatatgtatttatttaaatcattaaaaacttatttattcttaaaaaggtttaaaggtttattggaatctttttaagcataaatgaagtttaatttaaattttagttatcgcttaatatatcctcaattatatttttcaagtttttaccttgctcaaaatctggatctaattcaatagacttctctgtatactctaaggccttatcaagttgttgtaaattataataacaaagtgcaatttcgtaatttgtttctgggcattcaccataaaactctagtgaagattctaaaagctttagtgcatcattatcatagccaagataacctaatatagaaccaaaataatatcctaaatcgccttcttcaccaataggaaaatagtattcccaaactttattgatagcatcagcaagttcatctttagggaagttttcttcattttctattctttcaattaaaatattgtataactcaagcaaagttcttgaatcccatagcgtaaatcttagaaaagtcaagagttccttagtggtcaaggagttactcaaaggcataattgcttttttcattatataaaaatcatctggacctacactttctataatttcattgtaagccattgaagtttcaataaaatcattatcactattacttaccataaatagagacacatttatgttttcgtgttcatatatactatgtattgcttttccgccgagttctttaaaatataactctatagcatgaaaatttaccgtcatagaaatacatccatgctttgataaaaatggatgataatttttatccatgctttcttcattcttataacctttatcagcagatatcaaaatcacatcatcattaaacaactttcttaatcttgaaatacatcttaatccaattataggcatatagaatgctgtgtcctctaaagaatttttgtaatgcatcaaaacatcatttaaattcttatcttcgtaataactattcccatcaatttttttatctgtataataataatctaatcctgcaagaattgatttatcattaggatctcctttttcgtctggagaagttattgttattactccttcataaatctctccgttattaacataaaaagtgtcttgtggaagactgtcaaaagtataattagcaaataaaattaaaggattcttcattttcccttttgataatacttcaccactatatctaagtttaatttcatcatccttagatatatcaaaagttgcacaatcaagtattccagcttcgaaataaggacttaaaaagctatgattctgccaatattcaatatttctttcagcaaaatccgttactatatatttaaactttatatcttttaacgaagaattttcaatcatatgtaaaaatctttttagaaacgtataagtaaatcgtccaactcctgctgcaagctccataatatatataacagtatttttatctacatcttctcttgcaacatagtctcgcaaatatccaaagacagttttagcgtattgatttgcgatatacggattggttgttatatattgtggtacaatacctttaatccaagcctctggaccttggtttgcaaagaattctgtctgcagtttccataacattgactgtgataaaggcttttcagcttcaactacagctccagaactctcgttaactttcgaatttgaatccttagtgatattatattttttatttttttctgacaaaacaattcctccctaaaagtaaagttaaaaattacttttactaaaatatcattaacagaatgattatactattctaattaatttatgtatatagataaaccaactataatcaatacttatgagtatagatcaacgaaatgagtaatatacttttgttccagtttctaggtaatttcaatgggtgattctagggctataaagttgcacccaaagtgctagcctcaaagaacaagctttgaactagcacatttggaacaacttatagccaaagaatcacatccatcaaaattaccaatgaaacattccacaaaagtatattactcatttctagtcggagaatatttcatagtttatagttgtgtatccatacgcgtaaagcttaaccagtaatcaccaaattgtagggggaagagagtagctcattaatcttccctctgtagtttggcgttttcttttttctcgcttacagctccttcccaaacttactagtatctcatatattatttccaagttttcctttttaggaatgaaattaaggcatatttctttaagtttacttcctatagttgaatatatcataagcatacttatttctctattttcttctgttttatacttaaaatacaattcagaataaactgtatttattagcaaagttattatcaatctaccataaagcaaacaatttaagtaatcaattcctgctgatttgacatggtcaatctttccgtagcttttccagcatttaaataagagttctatttgccatcttaacctataaatatcaagaagcatgtccacatcagcttgttctttttcaatgtttgttatcataataacccagctcattagttccttgtcaattttctttggggctcttccttgagcttttgctttttctctagcccttcggattcgcaaattcacaatttcttctggtaatctttttcctattactctaaattcttctctattattttgtttcattccaacatataaataagtatctataacaccgctcgatttctttaagaaatcaatcatttcaactttttcaaaattcccttttttataattttctttataaagtgcagtattatatttaattttactaagaaaaaaagcagatttcttttcaagcattttaaaacactttttatcgaaatatcctaaatcaactaatagaagttcattagtgttaattttgtccgccaaagttttcatatatgaattatcatttgttgtgccatcctcaaattcaaatgtttcaatctgcttacttttgaaactatatactgtttgtattttcatttcagatgccgacttatcttctgaaaaacctttataagaatctcttaacgagtcatttagcttgattaagctactatcgcagatttttatatcattaaaggctttaaatatttcaatgtgattgtgtttaatgctcttaattattttatcctcaataatatttgtaagaatagtttttaaaaagtttgaacctgccttgagcttattttctatagcttgcctagacactttcaaattagggtttatatcttcacaaaaatttgctatatttcttaatgacggattttcaagactataaactccaaaagtaaatgctttaaaaaatgtaaatccatccaatttactatttctttgtgtaaatccagtagtcacggcggtttttgttattaatctttttgaaaaaagattaataattttcttaattttatccatactacttaatgaatttaaattaattttcattaaaagtcattcctttcttttttgtgtttattgttaggaatgactttttttattatttttataactgttaatatatgatttaactgttaaaatactcattagctttacgcgtatggttgtgtatctataaagctagatttatgcgataacttacttaaatcataaacattttgttctgaaaagcatgaaaatatgaacttaatgttttagtaactttgtaaatatgttcatctaataaatcaaattcttaaattatttatatatatacaagttttatccaagatactggccccaaaaaatcataattcttatttctagttgggatatatttcaccgtatgtcactggtaagactcagctttccaaataaactttttcatgatttatgcctataattagtaacgttactcacaaatttaatttcaacataaatctatagagaataaagaggctacgtaaaaacgccgcctctttatatacatgttttaatgataaatatacatttaaaattctataaataaaaatcctcagttaaagctagaatgtaaaagcttaattacaacacatatgttagtatttgccctaaaattattttagcttgtttttcttttgtttacagaactttatctgatgttcatttacttaccttcagcacactttttgtactctatagttttttcaactggtttaactatggatttatcttgccacttaccttgcctgtaacgtattacgcttgctatagctgtaatagtccaagttagtccactggttacccacacactccaaactcctaggaaaggaatcatagctagtccactcgaaaatccaactcttccagccacttcaacaaaaccattaaccatagcataaaatgcatctcctgtaccatttagtacacctcttgtaacgtaaatcattccaagaggaaagtatgcacaacttgtaatccttattgccttatctccaagatttattactgattcatctttaacaaacacttccattatagcttgaccgccaaattgcgctgcaagaaacgctaaaaggctaaatcctgcaactattaaaatgcttttgtgatatcctttttttaccctatccagtttattagctcccatattttgacctgcaaatgtagacatagctgcccctaatgaattgaacggctgctgtattagctgttctactctactagtagctgtaaatgctgcaacagctgtctctccaaatccatttactacactctgaagcgctactaatgaaacagcaatcagtgaattttgagctgctacaggtactccaattcttatacatttagttatgattgattcacttattttccagtgttctttctttaatttaaaatatggattcttgatcaaggcaaataccaagcagccaattgctgcacatgcctgagaaataacagtagcataggcagtacctgatacaccaagtccaaattttagtacaaagattaaatctaagacaacattaattgcacaagaaataattaaaaatactaaaggtgtactagagtcacctaatgctctaagtatggctgctatagcattatacgctgctacagctatcattcctcctgatgctattcttaaaaaagctacagaatcatttaaaatttcaggtggtgtattcaaaagctgtaaaacctgacgtgcaaaaacaactcctaatatactcataacaacaccagatgcgccaatcacataagttgaattggcaatggctctctttacttgttcttccttcttggctccgaaatattgagaaatgattatacctatgccaacagacaatcccaaacatacagagaaaaaaagaaaacttagagatccacaagcacctactgctgctaaagcattagcaccaacaaactttcctacgactattgaatcaatcaagttataaaactgctgaaatacattgcctataagcattggccaagtgaattttataatatgggaaacttcattaccttcagtcatatcatgtacatattttacagacataattaaaaactctccttcttttgtttacttcaatattacatggatttaacaaattaagctggcaatatattaacccaatatagacatatattgcagtgcatgttatattttttatgttaaatttaatttaagtctatattattttacaatcaatcttcttagaatttcgcaaggattgcgtttctatcaagatcttgtaataccattgaactatctacatactaattatatatatattaaatatttggaggtcttatatgtatcctttttttgaagcgaataaatctggtgatcaaaacttttttagttcaaaaattttagaaaatttcagttttcctccacacttacatccatatgtagaaatagcttatgttattgaaggctctatagaagttacaataaacgatactcaacgctgccttaaggctggtgaggtttctatatgtttccccaatgacatacatacttttaatagtgatggattttcaaaaattattctatttattttctcaccagatcttacacgtagcttctttggtatacgaatggacaaaacactagagaatccatttatgtcaaaaaatattgtcgatgatgggataagttctcttttatatatgcttcatgacgaatataaaagcgttaataacaaatacgttattaaagggcttttatacaccatacttggaaaacttgattcgcattttacatttaaaaaaagtagcactttttataatagtacaatgcaaaatctacttaaatacattgagattcattaccatgagaaaatttcattagatagtatagctaaagatttaggttttagcaaattttatctctcaagaattttttcaaataagattggctaccaatttaatgattacataaatagattacgaataaataaagctcaaaaacttcttagcgaaacagaccttcctgttacagttatagctttagaatgtggatttgaaagtcagagaaattttaatagaattttcaaagaactaactactcttactcctacaaaatttagaacaggtatatgatgctatttttcaacaactccacttgatgagttgaactttaaaaagcgtgtcccttgaaaagttaatgttccccattcatgttctggaacattcttgaagacatgttttccaactgtaaatttaatttcactcccagtgtctaactcaaattctaaaattaacttttcagtagttgtcataactccattgctgtctgtatttgtacacgtttctctttttttcttaattaattttgccttagtggatataattggtgagttttcatttttaatatatttactgatgtttataaaaattataaaagctacaaaaacaaaaaatattagctgaaatccaatcatcattaacccacttcctatctttctaaaattctattactttagcttaaattccatattttatttattttaacttgattttgatgacttatttatttaatacttatcagttttatacccattatatcataaaattagatatattagcccattaagcattatttatgctaaaatgaagtcaatatctaggaaattttcgcaataaacttcaatgaattaaagttctatttataatacatattttcttaaaaattaaagctaagatttttaaatgcaaaaaatctcagcttattaattatcaggtcatttaaaaatttcctaacaccttttgaatttctaactctgtcaaagacctatactgacctttctttagtgatttgtctaaagctaatccaccaattgaaattctctttaaatatacaacgtagcagcctacagattttaacatacgctttacttgatgcttgcgtccttctgaaatagtaagatatcccgaaatgactggctgcgtacgatgatttgagtttatattgttcacattatcggtagccatttcatgtttaagatcttcatatatgccaaacttatctacttctatctttgcaggcttagttaatattttaccttgtccaatataagttccctgttctaattgtttcttatcttcttcgctcaaagaacctaatgcccaaaagaaataagttttttcaacatgcttttctggatacatgaccttatgttcaaattctccatcatttgtaaataacaataatccttctgtatccttgtctaacctaccaacatgaaaaattcctttcgtaccagcttcacctaaaaaatcaaatacggtcttatgaatctcatcagtttttgcagtaatacaacctgctggtttgttaaacatgtaatataattttccagcatagttgattatctcattaagatactcaatgacatcacagttttcatcaatttccattgcaggctctgttaccagctctttatttacctttaccatgccttctttaatataaattctgacattttttctgcttccaacagccgcctctgctagaaatttatctaatcgcatatatcgtcacatctcttcctttgtaaaaactcaaaaaattttaattaacttatcacttgaaacttgtccctaatgtcaacttgttatttaataaatctaaatcataaactctattctgcaaatataattattaatttggatacccatagtttaaagtaaatcagaatcaaataaactttttgaaacatatacatcttttatttcaatttgctccatatagattataacatctttttcattaattatttactaatttaaatttttgccatggagctattgtatcaatcaaaaacagttcttcctctgcaattcttcctaccacatttgatttaccggagtttttcataggctttttagctatctgcatttcacctgcataatgcccatataatgaactttctataataatatctcctcttcttatatctggagtattaaatacttcaaaatttttgtctttatatttaactctactttgagttgatcttattaaataatcagatacatctcctctgttaaaatgaaactcctcaagaactattttcttctctaattcaggtacatttttatttatctcacaatttaatgtcaaaacataaggatctattttacttaatgcctttaattcttcttcactagcaaaggcatttgcaataattacatcatctattaagtcagatgcccataaatgctttgcttgaactgttattggaagctctctatgaatttcaagagtgcataatccctcgtttacaggccatggaccatgatctgcactatgagatgaaataaatgctgcagttctgatccctaacgctttgaactgcttactggtttttataaaatgttcgtagcttaatcctgtatatctgtgtggataaaaattatgacagcctaatatattatctgcatttggcatatacgagaatatattatctatatattttgtcccattgctcatgtttaattctatttttaatttcttacttgtaaaggacataatagattcttctaagccagtaaatccaagatcaagtcttataccatagagtcctagctcattgaaaaaatctaaattcttataatcaattccaagttcatcgaatactttaggacttatatctgctattacttccatatcattttcatttgcacattgtattattttcttgaaattattgattattacttctttacttccatcaaatgataaaaggcatgtaaaaattcttttaaagttatatttatatgccaattttatataatcttctatttctcttgcactactgtgcataggataaactgatattcctagccttctcattaaaaaatctcccttattataatttttattatatagataaaccaactttgaactgaacttatgcatataactcaccgaaatggataatatacttttgttccagtttctagttgggatatatttcatagtataaatctaacttataattggcttatgtatatagatttcccaaacaagaactttacatatacattaagctaaatcaagtaaattgaagaactaagtcaatgtataagtagaattcttgaattgcttatctatatagatatccaaatttaaaactaaacttatgtgataacttaccgaaatcataaatattttgttccgaaaaactatgaaaatatcgctgaagtttctaagcggcaggttgcatccaatttagcatgctccaactttcagtttgacaagctaaattggaacaacctacagctaagaatctttgacagctcattttcaaatgttttcttcacaaatatatttatgatttctagtgaagatatgaactcaaagttttagaaaatttgtaaatatgttcatctaataagtgtaattcttgaattgtttatctatatattttcttatagattttcactgacaatcattttaaatatagtgtttctctatttaattgacgtgatttatttattataaaacataccattaaaaaatattttatcgtctaaaattgttatattagttccatattcgttagtaatcttttcagatcttcctcctccaactggaattttataaagattttcattatctgaataattcacataatagacataatctttgcttgcatttataaaagtagctttgtcattagataacttagcttttcctgttccatctccatttactttatataacttattactatctgatttgttactataaaaaactgtatctccacaaacagtcataaataaagtttcatcatcacatacttttgtattctcacttccatctaatctcattctgtaaattttatatccatcagatatattagtgtaatatatccatccattgcttacagtcatatcctctgtagcagaggaattaagtctaattctacaactgccatctaaagatatcttgtatatattatttaaatcaattgaatgtgaattagttcttttaacataatatatccaatttccttctacaaacatatttcctactgctccatttgctatgcatgtgtctcctgttccatctgttttaactttatttatactgtgatgaaaagcatctttccaattgctatagtaaatccagtcgtctacaagattaagattccacactctattgggaattaattgtgtattgtagcttaaatcacataaatctttcctaggaggatcatttttccttactctatacaaataatcaggagccgctccatagacatctcctaccctatttatataatatatataatcattatcttctacagccattccatcatttacaatattgcctgatgaattagaaatttttgaatcgtcatttttaggcgcatctgagctattgtagcaaataaaattaaaattatatattttatcataagtttcatatgaattttgatctgttccattagatgaagacttttttacaaaaatcataactttatatttaccttcagttaatgcattattatcttctattataaattcattatatgcaggtattgcatttgaatatccattggttaattctgtgtaatcttcattttcactcttagctataaatactctatactgaactggatcataattgccgtagtcataataatctccatcatacttggaactcatatttatcttgatggtgtcaccacttagcactggataatgatcaactcctgcatattcgacatatggattttgcttttcaactgataaacctgaaacggtaccaaaatccgtatgtgaaaaatcagtttcagttgtatcagcttttgcacttgtactacatgttataaaaatcaatgatgtaatagtaatgactgagaataatctattaataaccttttttgacatctatacatccacccctgattctttttattttataaaatatttattgacagctctaagtgatgcatctgcaactttctggctgtttagtctatgcatcatcatctttgcatcaccatcatcgcactcaacagtcgtttccatgagcactgcggggcaccatgctgatgataacactgcgagatttggcctatcttgaagtggatatgtgttagtttttatggtactagacacttctctcatgagtattgttgcaaattctcttcctggctttggagcagtagaattatatagtacggtagttcccctaaacatataaacagactgcatattaacatccaatggaagtgaattattgtgtatacagaaaaataaatctgcattcaaaagatttgctggatctgttctatctaataatccaacatttctatcatcatctctagttatatatatacgatatcctgctttttcaaggttttcttttactcttttagatatatccaaatttaactgcttttcataagtgaaattagctgttgctccaagctctgagcctccatgaccagggtcaataattattattttcgagttatctttaaccttttcttcaaatgtaacatctataaatgttttaaactcatatttattatcccctaaggaagaatatctcctttttacaggatttattttaacattaagttttccagaagtctcaatatcaacttttgctgtattgttatcaagtttatctagctttatattctttatatatttattatcttttaaaactgaatcgaagttatcagatgcaccagtaacattaacctgtgaaataagtatttcaactttatttccgtcaatgctttcagaatacttaggctccacggtatattttctaatatctcctgcctcagattctgtacttgagtaggacaccggaattcctaaagctcctttatgttcaacttgataatatttaaaagcatcttgttgtaagtcataaactttgctattgctagattcagtagtagtagtttcttctgcattgcaataagaaaaaggtagtataaaagtacagactaaaaaaatcccaaagaccatacatctaaattttttcataaatacttacctccactacatttttgctttatatcctatatagacttttcattctattttttcataaatttgtttggactattcatttaattacataatatttaatttattttacttttcatacataatcttatacattcttaccattttttcaataagcacattttcagacatagcagtcattaattgatcttgcgcatgaaccataagtaatgttattttaattccttttccatttatctcagcttgaatcaattttgtctgagtgctatgagctagtttaagctcttctctagccttttttaaaaattcttctgctttatcgtagtttttattttcagcttcatcgagagcttcaaaggcatatgctcttgaatctcctgcatgtgatattatttcaaatatttcttgttccatatagctcatctcctaatattatttattaaattgtggtaaatatcctttgtttaatgaatacaaatcttcaaatagcttaattgcaatatctactgatgggactagtggattattagctagtgccattatagcttgatttatatttccatgtactccagcttctattgttgatatctcataaaattttacactgtgaataaggcctaaaattttttcttctacaggtcgtgtcaaagatagtggagttgcacctcttttatctactaaacagttaacttcaataacggagtcgtctggaattcctttaatagttccattatttctaacatttattgtatgaatatcttttttatcattgtatattgaacttatgagtgatacagctgcatccgaataatatgctccacctcttttttctaactcaggtggtttaaagtctaaatttttatccttatatttttcaaataagcttgcctcaattctttttacctgttctgcccgtgttccaatagttttggctgcatctttttcctctttcaacaatctatctgtcatatagtaatatctatgataaggacatggtatcattcctaaagcatctaaaaatttctttggccattttaaatctgatatatttttcattgtaagttctgcaccatcttttaatttttctataactctatcagttacatttatgcctttataccatacatttcgtccccatactaaatgattaagtcctacatattctataaagacatctttactgttgacatctaacattgaaactacatccatcttcatgtgtattggaacattacatagacctatacatttaatatttgtatatttcaatacagcttctgttataatccctgatggattagtaaaattaataagccatgcattagggcataattcttttatatctcttgaaatatctaaaattactggaattgtcctaagagcttttgcaaaacctccagggccaactgtttcctgacctaatacgttatactttaaagggaatctctcatctcgtgcccttgcatctaatcctccaactctaaattgtgttactacaaaatctgcattctgtagagcctctcttctatctaatgtaagagaaattctaatatctaaattagccttttcacacattcgctttgctaaagctcctactacattaagcttttctttcccctcttctatatcgactaagactatttccttaactggaagttcatcttttctctttataaagccttctattatttctggagtatagctgcttccaccaccaattattacaattttcaattcactcatcttgcgcctccaacttgattttgttatgcagtatttatgcaataactgcataacaaatttataataaatttttactaattattttctatgccctctttaattagtttcttttcatatgcttttaagaatgggaaatataaagcagttacaatagctatatttattaataccaaaattattgctctccagtctccaccagttgcaagatacgcaccaataggtgctggcaatgtccatggtgccaaaataactggtttagatactaaatttaaggtcatagcaaagtatgatacacacccgcaaattaatggtccaagaacaaatggtattattaataatggatttaacataattggagctccaaatatgactggttcattaatattacagattcctggaatcaagcttgctctagcgatatcttttaagtatcttgatttagagcctagcattaatattacaaggcctatagttgctcctgatcctccaatccatacaaaccattgaaaaaatggctctggtgctatattaggaataggctgtccagctgcttgagctgccacattagcatcaagcattgcaagccatataggccttgcgacagtaccaacaacagaatctccatgtattccgcatccccataaaagtgtaataagtaagattggaactaatattccaggaagtgaattacctgcagttaccaaaggcgtaaatatacttagcacaaatttttgaatatcaaaatttaataaatctcttatgatccatattgggactataataaaagctgctggaataagagctgcaaaagaattagcaactgatgttggaacttcttttggcatcttaatagttagatttttttctttgcatactctaaagatttctacagcaaaaatagacattataatagcagtaaacataccagatccgcccaaactagataacgataacatccagccattaggatcaatatttaatggaacatttgtaagcaagaatgctgcaagccctaagcttccaccagataaaggatctagcttatatgactttgctagattatatgctattccaaaagatgcatataaggccattatgcccatacttaagcggtatggaaacattatctgattaacatatggagccactaattgctttagccagtcatttggcggaactgcaattacgaggaaaaaacttcctattattattagtggaatagtagatactataccatccctaatagcttttaagtgcctttgctcagataatttagtcattggtggcaataagtacttttctagccaattaaaaaatttattcatacttcctccttatcttttattacagtttttacttacaatagctctttatttgcttaagaactcttgctccaccaagaggcgtatatcccattggttcaatagcagttacttcaaggctatattccttagcttgatctttaaaaccatttaatctatgtcttacctgtggtgcaactaaaactaaatcatatttattttgctgaatttcatcctcaaaatcgctagttcctactgctttgatttctagatcaaagccttctttatcagcttccttttttatcgcttgtacaacaattgcactagacattcccccggagcaaaccattaaaactttcataacaatatcccccttcaattagcaatatatttaaatgctgctttacaatatatgtattttagtgctaaccgtattattacccgcttttggttttaatttaataaaatttcataaaaaatccttatgcttgaaattttgtttcataagtttgaaaatttaagttttgcaaaagaatattaacaaataattattgacaactgataatgattattgttaacttaaattaagtactttggaaattatattttaaatccatgtacgttgattagataaatattattgatattttatagatcacgaaaggcggtaaaatcgatgaaagaacttcataatatagggtggtatgctagtaagatatcccccaaactacctaaaaatgcatttaaaccagtaccttcaaggctgtttggaggacttgcatatacaattattataatttgtggaatactcacaattactctatgtagatttaataacattataaactttttaatatctttagttttaggttttagttttgcatccataggatttcttgggcatgaaatcttacatggcactgttgtaaaaacacattggttaaagaatttgcttggagggatagcttttttgccattaagcataggtccaaacctttggattaagtggcataatatgagtcatcatgctaatactcaacatgaaataaatgatccagatgcttggatgagctttgagcaatttagtaatagagcttttataaagtacatttataaacttcctttgtggtttcgctcactatttagtttctcagcattaagtatttcatttacacttcatggaactcgcatgttttttatatatgttaaggaatttaaaagacaaaaaagcataaaactatggattcagtttatactcccttggattatatggataggtttattcttcttagttgagactgataaatggattttctcatatttacttccattccttataggaaatttcattgtaatgtgttatatatcaagtaatcatagattaaatcctcttgtacctataaatgatcctttagttaatagtctttcagtaactgttccaaagtggcttgatgttctacattttaatttttcttaccacacagagcatcatctatttccaggaatgaatcctaaatactattctctagtaaaggaagaaatattgaaactatggccagatagatatcatcaaatgccgcttttaagtgctttgaagcttctttggaaaactcctagaatctattataataacgaggaattaatagatccaagaaataaacgcatatatacttcactagaaaaaggattaaaacctaataagatttcttatcataatctataaatagaattagagatatatagataaacaactttaaaactaaatttatgtggtaacttaccgaaatcataaatattttgattccgaaaagctatgaaaatatcgctgaagattctaagctgcagattgcaccactttagcatgctcccactttcctagggaagctcgactcattacattcgctgaggaagttcgagaacccaaaataaaattttggactctcacttcacaagctaaagtggaacaatcaacaactaggaatcttagcagctcattttcaaatgttttctccacaaatatatttatgatttctagtgaagatattaaattaaagttttaataactttgtaaatatgttcatctaataagtctaattaataaatactagatttttataaaaacaaagacttaaagtatctgctagttactttaagtctttttaatatcatttgtaaattaaagataatatcttgattagcgaccagttaatggtaaaatttcttttggaaacttctaaaaatattattattaatctagatatctacaattataatcattatataaattacttgatccattaaagcagtaatcatcttcattctacatatctatattttctaattgatatagcaagcccaattaaaaaaataactactatggatatcatatttaaagtagatggaataaaggttcttacaactccttcatgtggactcagtaaaactggtgcactccatggataaaatgctgatagataaaagccctttatccctaagagatattcatttaaaagcaagtgatacgattgcattagtttacacaaacataacattaaaaaaatttaataattggagtatttaagagaatagttactgaaaagtgctcataaatcagcatgtattaaaatattcttaaaaagtaaatgtatgggaggtagatttaaagcgattgaacgatattgagaaagataataaagtttagtttattctaattggtaaccgcaacaaatctaatgaagaaatttgactaatttggacatttacaattaatgcctaatataatatattactatctataccaatcaaggcacaatcaaaaaaataataaaccagtatgcttgcctatttcgcgtcatactgcgtcagcaaatttagctaataaacctgctatgagcttaatttgcttccttatctgacactaaatattcagcgcatctttgatctattattttctttcatgtgcctaactaaacaagtaaatgtcttacaaaaagacaataaatttatggagggaattttatgaattcagaaacaatatcaattctaatttatgtgggtattggaatcttagcgctatttatattactctatggtataggatttacaagtatcggaactgatgaggtaggtatagtagaaaaatggtggagtttaaaaggttctgtacctgctgatggtttaattgcattgaaaggtgaagctggttatcagccacacgttctaagagctggagtgcattttaaaactccttttaagtacaaggttaagaaagtaagacttgtaactattccccaaggacagataggttatgtatttgcaagatcaggagaaagtcttgcagatggacaaactttaggaaaagttattcctgagtgtaaatcctttcaggatgtagtagcttttttaaataatagaggacaaaaaggtcctcaaaggcaaattcttcgtgaaggtacttatgcatttaatctagctcagtttatcataattacaaaggataaagtacattcaatatttacatcaaaggatgaatcagagcaaatagaaactatgagaagtgacttacttagagttaatggattccttcctgtagttatctcaagctcaaaaaatcttgaacaagatgaatatggaaataatattaaaactaaagatacaattggtatagtaactgttaatgaaggacctactccagataacggagctataatcgctccaatagttggtgatggtattacaaatgaatattaccatagtaacttccaagaacctgaaaaattcttagctgctggtggtagaaaaggtaagcagatgcaggtattaacagatggtgtttactttattaataggttatttgctaatgtggacatagttccaaaaagtattatagatattggttatgtaggtgttgttgttagttactttggtgaaaaaggtgaagatgtatctggatcagattactctcatggagaacttgttgagcaaggcaagaaaggtatttggagagaatgtatgatgccaggtaagtatccatttaatacttatgcaggtaagatcattccagttcctactactaatgttatattaaaatggattagcggtcaggttggagatcataaactagatgataatttaaaagaaattaatcttataactaaggatgcttttgaacctaatctcccacttactgtagtgtttaatatcgattatagaaaagcttcttcagtaatacaaagatttggtgatattaaacttcttattgaacagtcactagatcctatggttgcaggttactttaagaatattggacaaactaagactttaattgaattggtacaagatagaagcgctattcaagaacaagcttctaaagaaatgaaggaaaaattcaaattatatgatttagaattacaggaagtattaattggtacacctgctgcttcttcaacagataagagaattgatctaatccttgcacaacttagagatagacaagttgcattggaagaaattaaaacaaatgaagcaaaacaaaagtcagcagaaaaacaaagagaacttaatgaagcaattgccaaaagtgcagctcaggcagcgcttactcaatcaagtatcgatatagaagttgctgataacaaaggtaaatctgaattaaaacttgcagaacaattagctttaaagactcaaaagcttgctgaagctgataagtacaagagaacccaagaagctgatgctttaagatatacaaaagaagctgaagctgctgctaacgctaaagctactgaacttaatgctgctgctaatgctaagcaggtagaattacaagctggtgctgaagctttcaaacttgaaaaagttggtgcagctcaagctttaaatatcaaagctgttgcagaagctactgcagaacaagaaacaaaggttggtcttgcaaaaggtactgctgctaaagccttagttgatgcttatggcggtcctgaattacaagtacaacaaagcgttttaaccgcttttgcagaatcattaaagataagcaaatcccctcttgtaccacaaacagtaattatgggtggtgctgatggaaaaactcctaatgctatggaaggaattttaagcatgattttagctaacatggctagtgctaatggatcaatagtaaatactgttacacctgcacattctaatataactaatcaatcagataatagttctactaaagaatcaaagatagctaaaaagaaagataatatttcagccaaggaacctgaagtataaacctatttttacttctagtattatatggatatccaactttaaaatagatttatgtgataacttaccaaaatcataaatattttgttccgaaaagctatgaaaatatcgctgaagcttctaagccgcaggttgtatccattttagcatgctccaactttcagtttgacaagctaaaatggaacaaccaatagcggaaactcgactcacattcgttcactgagtaagcgattctcaccaaatcaaagatttgggttctctgcttaagaacctttaacagctcattttcaaatgttttctccacaaatatatttatgatttctagttaagatacaaatttaaattcttaacaactttataaatatgtttatctactaatccaaatctttaaatttgatatctataaaaacgagatgtatctaagtaacttttgaagttatttggatacatctcaatttatataaacgaatattataacaatgcatacttgtttactctttatatttgataatatatgggtttttatataaatgcataatatatatttttccctatgaaaataactccataagctcctcttttgaaaggcttccgagtatgttttcgctcttataatcactctccagaataccactaataagttcttttttactttcctgaagatttataattctttcttcaatagttccttctgaaattaatttaaatacttgaactacattcttttgccctatcctatgagctctatcagtagcttgatcttctacggcagggttccaccacgggtcaaaatgtataataatatcagcagaggttaaattaagtcctgtccctccagcttttagtgaaattaaaaataccttgtacttatcactaccattaaattcatctacaagctcaagcctctttgttgcttttgtacttccatctagatacatatgctcaattttattttctgataattctttagaaatattgttaagcacagatgtaaactgtgaaaataaaaggatcttatgtccattagctatgttatcttctataagatttaaagcttcttctaattttgcacttcctcctgtgtatttatctactactatggatggatcgagacataattgtcttagctttgttaaataggaaaatatagttatcttatctctttcaaaattttcagcttccattttttctttaatatctttcacataggaagcataaacttttttttgttccttttttagttccacataataatttttctcaattttatcgggcaattctctaataacatctttttttagccttctaagcatgaaaggtcttataaatttttgaagttcaattgcagaattgtcattatcaataaattttttcttaaaaaacgttgagttatacaaataattaggcataataaaatcaaaaatgctccacagttcaatcaagttattttcaataggagttcctgttaatacaaatttgttttttgcttttatatttttaacgcatttcgtactttgagccaaaggattttttatattctgaccctcatcaagtatacaataatcaaaatgtaatttttcataattttcttcatcatttcttaaagtaccgtaagtagttagaatcacatcatattcatctatgctttctatgttttttactctttcattcttattcccatggacaacacatatattcatagaaggcgcaaattttaaaaactcatttttccaattatatattaaagaagttggggcaattattagagccttcttatttttttctgatagtaaaaatgcaatagtctgcactgtctttccaagtcccatttcatcagccagtactccgccaaaacctaaataacttaaattcttaaaccacttaaagccagttatttgataatctcgaagctgcgttttcaagttatccggcataatatactcaagtttatctaattctaaaaccttatttgcaatgtcttttacaacatttttaccttttataaatgataaattactattttccaaataatcatttaatacaatagctttatttttgtgtaattttatttttccttccttatttccgcttgtaatactatcaaccaaggtaagaaaatcttgaatttcttttccttcaagattaataaagctatcattctttagtttataatatttccttttgttattaaaagcatctaagatatttttatattctttaggagatatatcatctatttcaaaattaaaatctaaaaagttatcttcactctctttaatattggcctggattttaggtgtatagtagactttcctctctctaaacctatctgaataataaacatcccctaatgcttcaagttctttatatttatctccaagaaataaatacaaatcatattcatctccatcatattcaaatatattatccttataattaaaattgaggttagttaaaacttctaaaatattttcttccttatttgaatcacgtatgatgattttatttttattctttgggccagaaaaatattttaatttttctttaccatatattaagtttacatctaaaactatctgcttctttcttatatccaaaaagaattcagctattaaatcattttttaccaagttatcaattttttcatctattttaatattaggagctataacttctaattttggcattacttcattaaacatatctaaagccgcttcttttttaaattccagtcttttgaaatttttaaaatactcgtaaaatatcttaagactctcaatttgtgactttgatggcaaataaatatttttattaaataaaaaaacatcatatttgctagttagcggtttaaaagaatcctcacttatttttataatatatttttcgttattttcaccaatatccatttctaaaggaatattatcttcaataatcttaactttttctaaatcatatgtgatatttttttcttttactatatgtaaaaaacgtctaagagaaacatcattaatattgagagatttaccctcaattaatccactgttatatctatatgttatttcatcgttagccacatattcttctataagttccactatatcttcatctatatcattaaatacatggatagatggattatatgtaaattcttttccatactgaatattttgattttcagttcttgcttttataaaatcttttacactttttaatacatacatttttttatttccaattttaaagtctgcttgaaaatatccactagtcttcttagagtttaaattaacctctaatttaattttttcttttggctgtcttaaatatttaagcttatttaatatatcatctcccatattttcagccttttttgtaatctcttcattcttagcttttcttgctgatatatattttgatactaccgcacatatatgtttacacatatacttatttcttggagttgtatttctatgaaaatctgagcaatcacaatatgtcccatttatttcactggaatttccatctatcagtactttaacctcgtaatgatagtaactggtttgggataagaccttagaatgaatctctataaaatccctttccctgtcaacttcctcttttaaacttaatactttcccagatctaattaattcatttcctttttgctttttaaaaaattgtactttactttcaaaattctcagatagttttttaatactaaaattcataattcaaatcaattcctttaatttattcatccaatatctataattattgccctacttatttatataattgcatgaaaatgtagaactttttcatgctttttatggattataaaaagattttttaattatatcattttatttagaacaagttaattattttcttttttcgtttataaacttttgaatttatgatacaatcaattataaaattgtaaaatcatttagattatacaatttattttaagcatatgaaagaaaatatatgagagtgccggcttgttatttcatgaataggctttacactggagggataaacatgaatgagaaacaaatagaaatgatgaagaaattaatagaagaaaagaaacaaaagggaaataacactaaaaataataaaagacctaaaaaggttattggacgaatgttactagataatggtaaaacaactcaataaaacattattattctaaaggggataatgtaaatcaaaataaatttactttaacttcttataaaaagttcagttattctttcttcaacaagatcttactgatacttctgaagtcggaatagctgggttactatctatataatagatagcctgaaattcttctaaagctctctgttcataagctttataaagttatcatgtttcattagtattgaaaagtaaatgcttgaaccagttaagaatgtatttgccattggtacaatgcttaaaattattagactcgcaagcacctgccattcaattttattacttttaaagtctatttctttcttatttataaatactctgataaaaaataatactagaaatatgtagcttaatactgtagatattgaatatagatattccattttatcaagtccttttatttattttttatgtacattactattgtatacctctattcaattaatttccactaaagttacatttttatagttattttttattcatcttacttgcaattacatgtgagaaaaatctggactataagaaagcactgcgcgtatatgactttagcacaatgcttttataccgaaaattatgttaaagatttatgggtatttcttcgtacaattcatctctttcatctgagtaaagccagccttcatcttctgcataatcaaatatttcttctaaaagtatattgtattctttagcaaaaactgctggatttcttttatatttatcaatcgttttttctgggaaatcgttctttctcatcttctcttcaagcacaagtgcttttaaatatgtacttcctatgagttctctaatcacattatatctataacttctcgcactacagatataaagcctgcatattactggtctctctccatatatagtgcatagatttgtttctgttatgaaattacagtcagttttcttatctaatacgtactggtcaaaatccctatagtaatttctctttttaactaacttttcctgcacaaaatctgaagctgcttcattatcccacttacttagtttatttacacacacattatccatttcaacagaccaagactttttgcagcagctctcctcgcacccattacaatcaagaggattattgcttaaaaatatatcaattgcatctaatacatctttaactgttgtatttttagtaattttgtcataattcacttttccttcgtcatcaaatagtaatttcattttatagttcctctatttcaaattattttttcttaataaaaagagcctaaagcagaaaattttcaaaaaatactttcaactttaggctaaaatttttagtctgttaatattcaggtagttaaataataactacctgtaaatttttaatttccccaagaatgcttccgagacacaaaatgtggaagtcgcttttttgtaagtaaaatagttttatattataatagttaatactattagtaacgctataatttattacttaaactttctctttctagcttcttctgactttttctttctttttacgcttggcttttcatagtgttgtctcttttttgcctctgaaaggattccagacattgaacatttctttttaaatcttctcaatgcttgctctagagattcgttttctcctactttaatttctgacatacttttatccctccctccggcgctgtattgtaaaccacattaatagtttacaaatataaactcatattatactatacattatttactaaaatgctgtcaatgccctaatagtttaataataaagtcttatgatacttctaagctagatattccgtggccctctgcactttttaatgtatataaaaaaaatctgacaggtgaatttattttttttattcttgtgattgtattcaagatcatttcaatatattgtttaataatttgcctacagatttaattgcattatatttttctacgaaaataaaattattatactttgtaaagattttcctttcaggggtagttcctaaaatataaaagaactcccacatagaatgagagctctttttacgaatcgaaaattaagaaatttatatcctattaatttcaagaattaggatagtcagtaactgattgtttcatattaccagattttgctgtattacctgtattatttactacatgtgttatctcaccattaccagataaatatacggaacatgcatggtgtactttaactccagacgcatttggaacctctattccattattttctgatactacagcatctctaaagtatgagtaaattcctgatccaaaaagctgatgagaagtaactgaatcagctaccttgtaagaagcatatccgttttgagtaccattattgctcatccaagatgcttgatttggaacatcatatggtaattcactttgatagaagtatacttttccgccattaccattccatatagtttgatactccttaaaatgctccacaaacaatccatatagtgtaacattattaccatttacaataacaccattttttgcattgttaactgtccagcctacgcctgtaccatgatctgcacgccatacccagaaatcatcgcctataacattattactatttatttttagactggtatcagcatttcctactgctgccccaccaattctaaagaataaatcactaagacttgtaggattagctgagtgatcagcagaacttccatcttgtccaactttcaataatactggtgaattctttgctccagcatcaaatagaattccagaaacctttactccgtcaacatctgaaatattcattgcagcagtaccattgtctgggatcaaagttgcaagtccaagacctaatataactgtattagactttgtaacatttatagcatcactaagatgatatactccaggggtaaatataatgttctttccttggctaagggcggcatttatgctttcagctgtagatgtatctggttttgctatatagaactgatctataggtaatgatgtaccttgtcctagaccatttgcccaagttatcccttgagaattcttcctaagatcaggaacaaaaacttggtaatttccactatcatcaatataaagaaatggtttttctctaatagctggtgtttgactgactactgtatctggtgttgatggatatgcattgtcatctgtaggtgctccattattccccacaaaaaccatgttccagtttgcgccattccaagaccccatttgactgtttctagtaaagaattgttgttgtgatccggaagtaattgaattatcaatctttgaatcagctataaatccaccactagaccaagctccatcataattagttccaagtggatcccataaagacaatccacctttaatgtgaacacgtctcattggtgcagcttgtgatactgcccaagttaaggtgcctgctggcgctaaattattagaagaataagttggagtcacagcaacattttcaaccgatctccagaagttacaagtcgcatttccacccatccaatctgcttcacaacgtactgcaccagttatattaacagcatctggtgtctttccaagtcctaatacagacgtaaagaaacctacatttacatttacgttatatgaacctggcttaaacaaaaaggcatatctttcatttccaaactgatttgtctccatcttactaaatacgttatcaacagtattttggatatcagaacttggcattgatggatcaaatattttaacatttggacctaaatctacattatttactgtattaccatctggagtaccgtatacttcaaattcccatagagagtacccatactgtgtagttcttgctgttccaagcattcttatatatcttccagttgcagtagaattaaaagttatgttttctactcctcctgttcctcctatttttgtataagcatctatccaatttttattatcagttgatacttgtatcttataatcttttgcagcagcagtttcccaatttagttttactcctgagatattataacttccacctaaatcaatagatatccattgaggatcgctgccttgagcagactcccacctagttcctgcatttccatcaacagctaaagaagcagtatttccacctgtaactgaagatgaagttgccgacttatttaacgcaatattagttgctactgctgcactttctgtagatgcatttgaggtaatttcactgtttgctcctaaacttacagtttcagcctttgtgataaatgaagttgacataaacatagtagtaaagacagccattgaaagagttaatgataaaattcttttatttctcctaatcattattaaactacctcctaaaaatacaatttaaccttatattttgaatatttagcttcttaattaaaatactctacttgttttgttgcaacaaagacattaatttacttaactgctttgaggttaagttttatattttacttcacttatacccaatactaaagcgctttagcattaagcatgatgaaggtaaatatcgaattattaaacttatttaactgaatttatttaattagtaactggaagtagtttttatgtcgagaatttaattgaaacgtatacatagaatacttccctttactagataacaagaatttaacttattagatgactatatttacaaagttggtaaaactttaagtttatatcttcactagaaatcataaatatatttgtaacctcaagggtcataatatggagaaaacatttgaaaatgagctatcaataatatttctttattcattggtgatttcattataaatgagaattttatagttatgtaaagaattatttttacgatatgctgcttgcgatgtgtatgctttactttatatcttgataatactctgataaaaatccaaagtaaacacccatttctctaaacgtatatattttagaatgaaacgtaaatctacagtatattttttataaatattctttttattcttaaaaatgtgtgtttaattcttataaaaatgcaaaagccatccatttcactggatgactttctataatgttaatataacttaaataatttcactgctgtttttgcaattttatatacaggtgtttcaagctctctgcttgcattcttaagttcttttcgaatctctatatgctgtggacaatggttttcgcatttaccacattcaacacattgtgaagcactgcttggatttttacgcactgcagtgcacattagataattatgcctgcctgactttttattctcagagtacataagattatacgaatgaaaagttcctggtatatctacccccttaggacatggcatacaatatccacaacctgtgcagccaactttaatatttctatttagctcatttttaatctgttctattaagtcaaaatcttcttttgtgaattcatcaacctccacattacttgcaatatctatattttcacgaagcatttcaagtgagttcattcctgataatacgcatgtaacctcaggctgattccaaagccatctaaatgcccattctgctggaggacgtttctttgaattttcctttattatgttcttagctttttcaggtaataaattaactaatcttccaccacgtaatggctccattataattacaggaagaccttttttattagcagcctttaatcctctttttcctgcctggctatgttcatctaaataattatattgaatctggcaaaagtcccaatcataaacctctagtagctgaataaaagtttctgtatttccatgataggaaaagccaacattacgaatttgcccattttgaactttctcttttaaccaatcatctgctcctaatgcttttaatctgttccaagtctgcacatcagtaagcatatgcataaggtaataatcaacataatctgtttggagtcttcttaattgttctttaaaatacttttctaaatccttctttgacttaaccataaaatgtgggagctttgttgcaataaatattttctctctacatttatttctttttaaaatttccccaagtgtagcctcactacctggataaacataagccgtatcaaagtaattcacaccgttatttattgcttccataatttctttttctgctttatctatatcaatgctggttccttttctagtaaaacgcatacagccataacctaatattgataacttatttccgtttttatcttctctatatttcatttttgaagattcctcaacagaatccatcattgcaaccacctcatcaacaatttatataatatatgtatattataacaaattgaactttttgccaatagccgatttaatattcttttatcaagaaaaatgtggtaaatttgactttaaaatataattgattgttaattaattttagtctaatattgttgttacccctcagtaaactgctttaatgataaataatacatttgaaatcctagtaaagcaaatgctgagtttagaataagatgtagaaatctaattactgtataatattaaataaaaatttctaagacaggagaatggaaaatgaaaactaaaagaaactatggtttcaatgactactttgagttgtttttatgtgctcttgctgtaatttgttctatttattttcttattaggtgcgatatgcaaagaacacttcaacccatattaataatattagtgctaactgttataaaagtattaataaagaagagtagaattccaatttcgactggtttaagattttctgttttagcatttatttttgttactatgttttttgctaatgaatttaaaggttattcatttataccttatcttgataaaatagaacatctgtcgtcagggattatactcttctatataggttcgttaatattggaacttataaataaaaatgaaacaaataagcttaatataaaaacaattatcctttttagccttttctttgcaatagctatggctggagtttgggaaatttacgagtttacaactgatagattattaggtcttagaagccaaaataatagtctagtggatactatgggagacattatctgtggaagtattggagctttatttactagtgcttacacttacaaaaatttaaaagtaaactttaaagtttcatcagaagtgattggtgattctgacaatttataaaatagattttaattatatctttaagataaatagtctatatttgcacattcattaaaggcgtctagtaaatttagacgcctttgattttttctttatgcataaatgaaaagctgtcgaagttatcgacagcctaatgcttcctttcggaatctgattttattaatttttgaaatcttcaggctttaagctgtttacataccctagaacatcatctaatttctttgaacaacacattgcatctgtaccgccaccatgatagtaaacacaaaattgtcttttatttaaataaaagatatggtaacttctctcgcctacttgtctttgtcctaagcaaacctcatcatcataatctattaaatttctcaacactttattgctagcatctacatctttcattccatctatttcagaaaatcttgaaaagaatttaaaactatccattgttttcatacatctcactccattcacaagactttattaattaataataattatttgttaataaaattatagcataattttcatgagttgtatattgtttctaaatttttttcttatagattatttataatattttattttaaagatattatctaaattctgttgttccatcaggatattgtgcaaatcttcctttttctcttgggtgaacaaaatcgtcacattcccatggccagcccccaaaaccagtgctcttatagtctgcaaaagcatccataatttctttatctgatgtcataacaaaaggtccataacttacaactggctctccaataggttctccttctaaaagcagaatacagctttccttagcaccattttctatttttacaacttcatcacctgtaagttttacactattataaacatcaatatcagttccttcaatccgtattgtctctccctcatagaaataaatagttctatttaatgttgaagataccttttgaagttctatacttgcttcaggttccatacgtataatacatatccttacatgattattctctttacttgcccatgaattaggcgaaggttctaagcttttagtaccattataagtacccgaaataatttttacagtacttgtttttccattattgtcttttgagtttataacgggtatatcctctgcccaaagcattttataatgtggttcaacgaatttatctttcttaggcagattgagccagatttgaaataattctagtggattttccttttcagtattaactaaagggaacatttccgtatgattacagcctctacctgcagtcagccactgcacatcattagctccatagcgtcctgtagcaccagctgaatcagcatgatcaacatatccatttagaactattgtgactgtttcaaaccctctgtgaggatgctgagggaagcctggaatggtatctccatgatacatgttccatccatcaattcctctaaagtcatttccaatagttcttccatacaaagatgcatctggtcccatctcactattgccctttggataagcatccttgtgatgtgcacaaaatataaaaggatcacttgtctgccactgtgaacttagcttacttattttaagtatattatttttttccatttcgtaacctcccttgatacttcatataatttataaatagtctttaataattcccctataatatcaatcaagttagaattatctaatttttaaaaaatatattgattaaattttctccattttattatatgttacttttgtaaaatcaatcaaagcttataagttttattaattgataatgattattatttattaataaaattatagcacagctttcattatttgtatattgcttctaataatttattgcattttattaatacttagtatataggaaaaatttctctactgtgtacatattctttgaaaagtccgtaagtctatctgaaatattgagccatttatatttaataaaatgaattgagaaaactttaacaataaatttcacgttttatatgcaatatcgtaaatgaacgatattgctatagaattatttaatattacatattaataatttttctctttaatttcagcgaagtaatggtgaaacatctgtatcaatgttttttagcataaacattatgtaattaacttataaagtaaaaaaaggttattaaaggtgataaaaaaataacaattttgctcgaaaaatgttgattaattgtaatatattctatataattatctttaaaggatggaaaaataatcttttctccaaactttaaaataatatatgaaagtgaggatatcatattgaaccaggtaaacggaacaaaagaatggtctaatcctagtcccgcaggcctagttgctttagcagtagcaagtttctgcttttttgccttattatcaggaagagtaacaagcggagccttgccacttcttggatgctggcttattggaggttttgtcgtacaagttgtagttgctttaatcgatttaaaaggtggcaatactactgggggaaacacatttttattctttagtgcattttttatgttaacaggcggaattgaaatgctcattaaatttaatgcagtaactaacggaatttctctagatacgcgcatggatggttgggcatggttagtacttagtatttcacttatcatgtggacaccagcattcctcaaaacaccattagtgttatccctaatcgtttttgctttagatctatcttcgctctgtatttctctaattgatttaggagtattaccaaagattttttcaaatatacctgcctttggattattaatagcaggtattttaggaatttatcttgccgctgcaattattgttaataccgcttttggtagacaaatctacccttcaccaggtccaattattaaatagatatcgtcactttaactgcactaatctatttactaaaaagtaaatgtatacataaaataaaatctcaggttcaacagtaacctgagatttagaataaaaataaagactaaagttctcctatatacaaataatattggagaactttaatctttattgttttttcttctttagaggacatcttataggtacacaaaggatgcaaagctataacaatatctctgtgcacaaataaaattcaccttactttaatgcatttaaagcagcttcgtaatttggttctgatgttacttcctcgcaatattctacatgagtaaccttgttattttcgtcaactacaaatactgctcttgttagcagacctaattccttaatgtaagttccaaattccttaccaaagctcctatccttataatctgataatgtttgtactgcatcaatgccttgatttccgcaccatcttccttgtgcaaaaggtagatccattgatactacatatatctttacattatttaattttccagcttcttcattaaattttcttacttcaagatcacatactggtgtatctattgatggaacacttacatatgctctctttcctgtaaaatcttttgaattaacagcatttaaaccattatctgttactacgaagtctggtgcagtataaccgactttaatttctcttccttctaatgttacttcatttccttgaaatttaactttcataattcattcctcctaaattattaatattatattttaactattttcttagtggtttatcaaatatttttctgctccatatatactaacggctccatcagcagcagctgtaagtacttgcctaacttcttttgttctaatatctcctatggcaaatataccatctacgtttgttttacagctttcatctgcaataatataaccatttttatctaaagctactaagtctttaactaattctgacgatggatcacttccaattgctacaaaaacaccattaacttctaaattatctatcttaccatctttattatttttaatttctataccacttaatttttcttctccattaagttttgtaactccactattccagattatttcaacattatttgtttcaaacaattttttttgtgcagatttatttgctctaagtgaatctcttctgacaattacatatactttttcagcaattcttgaaagatgaagtgcatcttctactgctgtatctccaccacctacgacagcaactactttttttctaaagaagcctccgtcacaagtagcacagtatgatacacccttacctgtaagttcttcttctctatcaattcctaattttttaggctttgcccccattgataagattatgactttactttcataagtattcacaccagttataactttttttatatctccatcaacttttatatctattacttcctcatatttcataatgcttccgaaatcttttgcatgttcatacatagtattggcaagttctggccctgttatgctgcgaaaaccaggataattttccacttcatttgtagtaactatctggccaccttcatattgtttttcaagcattaatgcatttaatccggctctacctgcatataatgctgctgtaagggcagctggtcctcctccaattataataatatctttcatattaccaacacctctcctactaatcatttatatattctttgataatatacaatttataaaaattccactaagttgttctaaatttaattatttaattttataaaattaaattttgttatattttattttataatattatattagctttaatgatataataagtcaactattttgcaataaaaaatttgatatttattaaaaaattattgcgtatagataaaataatcataaactatacttagactatgaaatatctttcaatcagaaatcataaatatattttcatagctttttggaacaaaagtgtgttattcatttcgatgaggcacactcataaattcaggtcttagtttagttatctataattcttagatattttcattattcttattctgagtttaacctctttatgtttaaacacaaaaaacatataatatatatattgcaaaaataatcctcatcataattctaaaaatattacaaaaattttatccgtaattgtgaattgtgaaatgtgcattgtgaattgcaaaatatatagcaaaactatagcctaggcctataaatataactcaccgaaattagtaatatatctttatgctaagtatcttaacagtgtttcaaagtaaaaatatgtattacttcagtagatttaaacataagcctagtttcagataggagaaaataagaattatgaattttattaatcattttaaaactataactaaccataaactattagttatgaaatattgttttaaagtaggtttatataaacaaggattccttcatgatttatcaaagtactcgtttgtagagttttcagctgggataaagtattataaggggtatgcaagtcctaatggtgttcaaaaagctgttgaaggatattcatcagcatggctacatcataagggtaggaataagcatcatttcgagtattggattgattatggagtaaatgaagcagaaggtcttaaaggaatgaaaatgcctgttaattatgttgtagaaatgtttatagacagggtttgtgcttcaaaaaattatttaaaagaaaagtatactgatgaaagtcctcttagttattacgaaaacagaaaacattattatgtattacatgaagatgtacgtgctcttttagaaaatttgcttaataaacttgccaatgaaggagaagacaaaactttttcatatgttaaaaacaacattctgaaaaatacagaaaaattttatagtaaaacactttagtttatttttctttgagctgctccccaatatggctacaacctcttctaagctgggatttgtagaatgcaaatccaggcttacttttagatgtattttttaaaccactgtttgatagcttgtgattgttcctctgtatgaaagtcatgttcactaccaattgatacggttaaatcactattaaatttttttgaaaaattatctataacctcatgactttgcaaattatcttccgatccataaataattgcagtaggtatattccatttatcaattgggtgctcttttacatatctgtaataatcccatgaaaggatttcaataggagtagatatctcctttttttctctaagtaactcttctgtaacattgaaccatttgaacattttgcatataagatgctccatatcaacaattggtgattgaaaaatgcatttctttattggaaggttcttatatgcgtgcaaactgaaatacgcgccaagactgcacgcaaataagtttatttctttccaattttcttgtacatatgctccaattttttcgagatcatgtactccattccaaacattgcatagataatttttatttttcctttcaccatgttctgggagatcaaaacttagaacctgatatcctctttctgatgctatctgtgaaaactcatgtgcactttctttgctagacatttttccatgaacaaatatatatattttgtctgaaggttctccccataagatcgctggaatattatctatttctattttactggtggtttccataatggcgcctccataaatgtagtttcttttatattaggaagaatatcatatatggagcaattcatctgcttttcaaaatattctttcatttcaaatgttgcattccaacgttctactgtaaatggaaatgttccatagcgtcttgtcgtattaacaaatcgcttttctaacatacaaaatccttgagcgtcagcaagtgaatcacaaagaattaataatctatcatagtcatcataagttaaatcattaatatattttctaacaaattcactttcttcatcactcatatcattttgtcctatttctttatcaaaatcaggaatcggaaatgaatgtgtcaaacaaattcttcctacttcatcccaacccttttccaacataaatttatatccgtcaatgccatgtcttcttgcacttatgccgtatcttctacctatatcatgaagaagtcctaacacataagctttgtctggattaagattactacatttttcagcaatcatttgcgctgctaatccaacatttatagaatgctctgtccatggtccttgatttaattgtcctgctatttctaattctttttcagccacttctctacttggaaacatattatcctcctacatgtatcatataaattctaatttattatcttgatttcagttgcttaaatcactatttaatactctatgaatatgatgtttgtttataagtaaattatagcatgttttgtaaatgttatactattatgttttctagtagtacattttttatttactgcatcaaatattaattagatcatctatatttatggctaaatataccacaaataaatatttcatcctctaaatttttagattatattatttctaaaaaagcttttcatcatctctgagccctaatgtttcctataaattgttaactttttttattcttaacttcttttctttttttcttcttaaattcgttcatttttacattgtaaaaaagttttgtttgaaactatgtttctttaaaagaatttttaatggaaactatgaaaacttatttatttttaacaaggtttaaactatgctatacctccataacaaaaaaatatcacactattcatatattgttttgaataatgtgatattaaaaacatatatcaactttttaaggttttgcactaataaaaatttaacttcattgatctcatgttacaactcacaatttttctagtgcatcataacttaatgtcttaaatacttggcagtaatttttaaatccatcttgtccgatgatataaatattcggcatgtagtccattcttacttttgaatatgtgatacgctccaatccattatctatagatgtatgattacttaaagccacatctacttttttacgcattgcttcactaataaaataatccaatgatttgatatattctttcacttcattctttgtccatggtggtgtagtaccaccccataatgctgccatatgaagtttgccatcttcttctacaggaaatatatagcttaatcctcctggagtatgacctggagtaccgtaaacatagattgttttattacctaatgttattgtatctccatccttaacataaacatcaattttataatctttccacgtttctggtctatcaggttttgctggatgttcctcccaaaaaatatcatctattttggaaaggtatgtttggacatggtatttatcaataaaccattttccacaccctgtatgatcaacatgaccatgagtcaaaacaagtttttttattgtattaggatcccatcctataaatttaattgcattaactatagcttcaaaggctttttttgatggccaaatagcatctatcactataagcccttcacttgtctttaatacaaaacaatttgtttctttttgtgcaacaataagcaaatcgtcaaaaatcttagcatgaatgaaaaacgacatatcctccattgctttgattgtttctttcgtaataactggcttatttaatctattcatctaatatacacccctctgtacaatattaattttatatttgcacagaggatactctatttttaggatgcatacgtaaaaatatcttcatggtttcaccttcttttaatataaaaataagaattatacataagtatctagtacatcataacataagcaagttttttaagacatgttctttataataacattatctttcaagaactataaccacaaatatctactggagtgaccagaacttttctccaaaagtatgtttaagatgttcaataatctttggaatatccggttcattttctgactccaaaatccattttatcgtagttagagctaaagaagcgtaaagggttgaataataatctactaaagaactgtctttgcctgcactatgatctgttatatatttcatacaatatctctttaataaacattgtaagtcatcatataaattaagtttgtctgttctaattttccataatgcaaggataatcttcttgttatcatatgcatacccgtaggctttataaacaatagaaaaaagttcatcatctttcatattactaaaacgttcactaataaatacagtggctttcgtcataatttcagaaattagctgttctgctaattcatatttgtctgaatagtgtttgtaaaaggtggaacgattaatcaaagcttgatctaatatattttgtacagtaatttcagtaaaagctttcttagaaagtaattcaataaaagtacttttaatatttgcttgtgtcttaattactcttaggtccattttagtttccataaagacgtttctccattctgtaagtaattaattaaatacatattatagtaattacatatatccattttagcaaaataaaaataaaagacaatagaggcaataatttcaatatgtatatcaaacgtacttgatagctatctattactatttttttgtatacttaagcaacaaaaagtgacgatttgttgcttatcaaatattttttaagtttttaatgattgtaatgattttataaaaagaataaaatcaattcataaactgagaatcattcttaaccgaaagttaaatttatgctcttattcttaatggttcaaggttttaaaagtaagcttacagtatcgttaacgtaagaattatttaatttctaaaaatttaaactattaaacttaatttttatacatattaggaatggaaataaggaaaggtgatgaattttatgtcaaataataaaattgtaaaaggtagatttcctattgggttttttaatgatttacatccagattttagcattaattttcagatgaatcgtttttataattggtctaatgacgaggatatgctaaaggaaatgagggaagtaagtgcaaatattcataattatgaggaatatattagtaagtttttagaactatccgaaaaatcattaaagcaaggaaataaattaaaagctgcttattatttgcgaggagcagaattctatataaaagaatccagtccagaaaaacataattgtcgtaaaagatttatttcattaatgcaagaacattataatattgaggaaaatcaatatttcaaagttccctatgaaaatggatttctttcaacttatcgctttacaccagaaaatccaaaaggaacttttgtaatgtttggtggctttgacagctatatagaagaattatttccaatggctatgacaattaaagattcagggtatgatgttgtatgtttcgagggacctgggcaaggtgtgacacttgaagattataagattccaatgactaacgaatgggagaaacctgtaaaaacaatattagatttctttcaacttgacaatgtaacattgtttggactttctttaggtggttattttgtcataagagcagctgcatttgaaaatagggttaaacgtgtagttgctgatgacatctgtgcagatttttatgaattagtattaagacaattaccgttgaatttaaaagaaaaatttaatgatttaattataggtcagaagagcaaagaattaaatactttattagaaagattagcaaaagaaagtcttatgttagaatgggcaataaatcaaggaatgcatactactggaagccagacaccttacgattttctaagcaaagttacgctttacaatacaactgaaatatcagaaaaagtagaacaagatgtgcttttactagctgcacaagacgatcattatatacctcttaaccaattttttgaacaaggcaaagcccttaaaaatgtacgttccttaacaatgcgtatgttcactaaaaaagaaaatgctcaaaatcactgtcatataggaaatgttggactttccatagaggttattctaaattggttagaagaaatgaaccattaaataagctttatctataacatttaatttttctttatttttgattatggagttttcgataatatgtttatatattatcgaaaactttaatcatattctttttttatttaatatatcatttgcatttaagtatactacaccatttgagagtgctatactttttaaacttctccatctatagaatgaattatttactaattggaaagcaaacctcagtaacaaattcttctggacttttaacgctttgaggtccattcaagtaaatatcaaaaggagctccattatatttatatccattatcctcaatccatttgacaactttagcataagcttctccaagccttgaatacggcccaacaaaagttgtggatgcaaccatccctcctgcaagttcttttatattttcatttttctctgcattcaccctgctatttactggaacacaaacttcacaatctgcattttccacatcaaattcctgcttatcatgataaattgtcattactggccctgatggcttaagattcatcctgaagatatcctcaaatacctttcctataacactacttatattgctcatacttgtaattgttctcctgctgacaacaattaacgactttctttccttcaattcaacttttaaatccttcttagcttccataatattgcctcctaactcaatcttcttaattttttgttcaatagaattcttgagtttcaagttgttttggacttccttattaatctcagcaattttgttctgcaaaaactttttaagtaagtcagcatcttccttatccataatggctttaatttcttctaactttaatccatattcttttaattcagatatagaaagaagttttaaaacctgttcatatgcgtaatatctgtactgagtatcgctgtccacatgcataggttttaacagattgatctcatcataataacgaagtgtcttagttgaaactctcccaattttagaaaactgtccaatggtgtacacaattaattctccttcctgtcgacaatcatagtataaaccttccagttaaggttaaagtcaagaggtaattttattatttatattttaattttatcttacgaaaaaatattgtcttaattctttatttaattctgctaagttcatctaaaaatgctggtttctttctatataaagctattaattcattaactattgggatttgactttgctttcctgcaatctttttatattttttaattattctgcacacatttttataatgacttctatttgcagcccgacttgcttcaaacattatgtattttttataaatttctataacctcatctttaaatttagacattaaaatttctgcatagctatcgatacttgttggattgtctcttacatattccattatttcatccaaatcattttcttctaatattatctgaagaaaaatcttcttcgcctgataaccattatgatttttaagttcttgttttaaatcactatagaaacttgcttcattttctgtgatttcttttaattctttataatattcaaaactaccctgaagtaaaagttctttagctaagtctctttgttcatacctcatagaaagttctttgtatgctgtatatcttatttttttccattttgaaattaatccggcaaattttatgtcccttttttctccttccagtgccagctctataactttttcataatttttctcttcaaaatatttatttataagtagttctctaaaagacgaaaaatttaagttatcatttataaattcatctgcctctttcttagttccatgcttatttatcatatcaaataatacatgaagcattctttcattactatatttcatatactcgtcattagaatttttatctattaagcactctaattttaactttaatttatttctaagggtctctgttgctgcaacttcaacacataatcccaaaatatccattctataatctgtccatccactaaaaatatcactttgacttttgcttagtaatctttcaaataatttttcttttatctctacatctgcatcctcattagcatttattatttcatacattaaatcaattacttctgaaactaaacctccaacatctccattagaatcatcagcatactgaaaagcctctattccctcatctattactaaaaaggcaatatctactgctaatattatgtcatctgtttctcgtatcttttctaataattcttccatatcatttgcaaaatagctcgcttctctataggaaataaagccttctctgcctaaatgctttcttacaattgaatctattaattttttacactttttaagttcctgttcactatttccttttgaataccttacaataatgctatcttttaaagttcgatctttttgagttatatccaatatgatatctattaatttttcttttgaaagattgctcaaaactttctttatttctggttcatttgtctttaccttttttggtttttcattagccatatgattatttatattttcggctttattatcaatatctttgtttatattttcagccaattcaaaatacgctgcaacttcatgcttacatattggtccaaaatcataaggacaattacattcagaattaattatttctccattatcatcaagcgttactataacctgatagtcttcacttccttcaacttcaaatatgtaagtattatctccgtccatataagtttcaattatatttccatcaatataataatcataacctctttccaaaattgtcttatttatataatctttaaaattatctatattcattagaatcctctcttcatttatttattacctttaacctcacgactaatggtcagaattatattaactatattagttaaaatacagtaatactaaaataaaacaaacaaactattttcaaatgtttctatgttgattattccattgccaaaagctcaatacatacatcttatcttttttaccttaaactattgaacttcattaaaactctatatttataatacctaccattaattccaagtggacatatttctactttaattcactataattaagtatataatacacagctctctttaacaactcatatacttcagtaataatcaaatttaaatgaactagaatgtagaaagatttatattaacattttactatatttcatggataaaagagagatcatcgtacaaattaaattttaataagtacgatgatccttttatgaaatcacttttcttaaaataaaacttccttcctctaaatcttttggattttctactcttactacgattcgaaaaacttccctttataaaaattctcattttcaagtttctttgccgtcattctaaatataacgcagccatctggacatacaacatctttgctatacttgctatctcctccaatgttctctaaatcgccaccgcttctgacagcctccatgattgggaacataatcatcattacttttgaacatataccttgtccatccttatttacaggacaaccataggtgcaagtatacttatcaccaacttcctcgccgtttcggcaatacctttctgtgtggtcacttcgaagaaatcctgttacctcaatttcccattcgtactcttcatcataccattttttcataattaccctccaaattataacttatatgtttactattatttaacactcatttgccatttttgaatcagaagatattagacgccctcttccttcaacttttatcaatttttcaagttcttttaatgcttcttttgcaatccatatttgcggcttatttcctttttccattaattcataagctaatagtattgctttttcctggtagttgtaacttattttccctatttctcttagtgcccatgaaattgcttttttaacatgctctcgttcatcattagaatgttcagaaataagttttagatagttatcaataatatcctctgatattgatttctcatgtataagtgcagaagccattagagtaaatgctgctcttttggtatatgtttctttagaatcacaccaaatttttataagttcttgataatcttttaattttataataaggtttttacataggtggtcacacaaatcccacgaataaacttcatttatcaatttctcaacatcatgtaatgaaattgacttcttgtcaaaaataagtattgctaataattttgcttcatgatatcccgttctccataacttatgtgcaaattcatttgatttttcaattcttttagcaagttttctaatatctccagtagaaacacctatactaccggcttctggtattcccattttgacaacatttgatttatatttctctgagcttaatgattttaattctgaaataacttcatcacaagtcattattttacctccaatgcttttatcttatctgcattataaatagtttgctgtttattttaattgcaccaaacatcatgcttttttaccctttaaccttttcgctatttcttctatatgagtattgtcagtcccacaacaacctcctaaaattttaggaacaaaatatttatataaatccatcatatcatcagcaagactaacactatcagaaaatttcaaatcagtagaattatctaattcttctggggataattgcgaagtgtttgcttgtattccatgaaatctttctttaaccaattttgttttattgaaagaataagataaagatttttttaatattgctggatgaacacaatttaccatatagcaaatcggatttttaattgtagcattatctatatgtaaaattgcatcattaatggtagttccatctactagtcgcccatcattcctaatcataaaactaattatatatggcaattccgtactttccatagcctttgccattccagtagcttcagacaacgcaggcataatacctgcaaatagaaaatctactcccgattctttaaataaatttgcctgccacgaatggaatacctttgcgtcatctattgataagacatcactagctttatatgcatctcctttgcatcccattaaacctcctacaaacatatctatctttgcattactttttattttttgtaggaatctcacgttatcttctattattttttcagtaaattcagattctaagacacgatttttattggctcttcttgttggtgttgttacaataaagggtaattcatatttttcagcagttttcagatattccttataaatactacacatggcttgtcttgaatcataatcataaactaaaccagccatcgcaaccttatcatcaaatctaatattaaattctctttttaatctctctcctaaagctccctccattaaaatagatgaagctttatcaaagcaagtttgaaagtccatatatactcctctttacatttcaacttttaaaattttcacaccattgactagatatttaacttacagtcactcattaaattttatatatagcaatagaatattttatattaagtctactatcgattatgtttattatataaacactgcttatacgcttattttgatgctaatgaaaaaataataccatataaaacacatcctaaaggaaataatataaatatgcttcctaaaattattgaacctatattaaatgaaaaatttaatgcactgtcttttgttttcatctgtttcaagtatattttattcatccctatgcctgtaccaccgataattatcaaacctactcctataaaacaaataagagcaatgataattccaattatagctgcaaagaatggaaagaaaattataaatcccattatatcacctctcctataatttatttaaaatgaatacaccggcaatcaaataacataatgttatcaaaatgccgacccacatatgtatagcagaaagtaaccaataactaacttttacttttttatctgatgtatcaaagcgtttactcatcttcatccctttatgccctctaattattgcaataacagcaaaaaataaagcggctataaatgctaaaatgataagtgcatttcctaattttatcattcctttcctcctttaatctaaatagtatgtttaaattttgaattaacttagcacaatgtttttcctaacttacccaatttaaaaattaaattcataatcttatttttttatgatttaaagattattcccattctttgtaatgtatttttagtcttttggaatttaccatgatttccgataccaattaatgattcattaaacaagattttatatccattaaccactccgtcaatagccgaagcttttatgcagtaattaccatctacacctactaactcaagttccctcgcatttatattttgtaaatacgctaataattgcttattagaaaaacagcttgctttccttttttcaaatacgttattagatataacagacagcccatcaactaatttttttggttttcgcgacagttcccaaaagaatctatttacaatataaatcactgattcactaggatattccaaaattttttcatttattaaatctatgagttccttggtgttataaggatacatttttacatttctagaatccccaacgtagtcttcttgcatgtctataactaataagcatttcattaactcacctctacaaattactattgataatacccagtatttaattaaaaattataatttaaatatcacaaaactatttatatcttggatattctggaagcaggtcaattagcttgattgaccttccctgattatcaagtaatatttcaatgttatctgaatcttttccaaggtgcatcataaattctctacatgcaccacaagaaggtataactttaccatccttataaacagaaacgactttatctacttcattttctccatgtgtgagcattgttgataaagcatttctctcagcgcacattcctaatgaactatttgtgtcaatacaaattcctgtataaacatttcctttttttgttagtacagctgaagcaacgcttccaacccacatagtacttgaaatttcatgtggatttattacattcatggcttctttataaagcttttcccatatttgttccatattgctctccttaatctttaatttagtatttagatttatctatcaatctttttgaattctctttccaccaaatgcatgaattgtcctagttcctgcaatacatttgccacgatgtggtgttcccttaggcactaaaagctcatcaccaggatttaaaacatgctctataccattaaatatttctatatattgtcctgaaacgcaaaacgtatattcatcaaattcatgtgtttgttcctttgattctctatcagaatagtatgtccagaatgccatttgactaccatcttttccctcaaaataatacccttcaatatctctcgtattctgctgttccgatggaactttattcttttctcttttcataaactctggaaaatcttccatccttgaatcacccctataaactttaatttctgttttactttataacatcttggtagattatatccactatttcatttaagattaattccttatgtaagcatacttctgaaataacatctgataaatctttttcgttccaccattctctcatttctttctctccaaattcatgtgaattggacttttgcttgtgacgatttaaagtttcctcaaatggtatatcaaaataatatgcaaagatttgattgccgaattcatcttataaatcttgaaataattttttataccactttgaatttaaaattccttctaaaattactttattacaatgattcttgcgtatagtgaaagttcaaatattaattcacctgctttttggattaggtccatcttttgtaaatagaatgtcccttctaacaacatcttgtgaaattagcattgtttattgtccaaattttctttgcaaagattttcccgtagtagtcttaccacttccagaattgcctcttagaattattaacttcgccactctttaccacccagtcccccaatgtctttctgttttgagttaatcaaaccaacgtccatatctaactaattataacatattatgtaaaggctgcacgaattaaatattaaagagaatcaattctaatttatttttttagattagttgtaaaattataaacctgatttttatgtgatacttaaataaaattaaatacatgtaagttttcttgacaatagtatttagctgctatatactttttctatgatgaatattaatagtgaacgcaaaaataaaataagttatatcttgctaagaatacttaacagatttgacgaaatcgacaagaaaactcattgctatggaacagatacacctttatttagtgctgaaattaacatgcttagaataataaaagaaaatgaaggtatacatgtaacaggaatagctgataaactaggtgtaacgaaaggagctgtatcacaaatagtaaataagcttaataaaaaaggcttaataaaaaaagagactgatttatataatcaatctaaattaatgcttagtttaacttcaaaaggtgaaattgccgaattgaatcacgaaaaacttcatgatgaatatgactcaataattgatggtattttaaaagatgcatctaatgaaaatatagaatttctaaaggattttctaaattcttttgagaatcagatggaatttttcgactcagaatttaataaataattttttttactagaagtgtatagctgctaaactcgtttctaattttattaaattacttaaaaaatgttttatccaaagagtatagcatctaaacatattgtatgaattttatattaggaggattatatgacaatggaatcaaagcagaaaaaaatcaaaataatgagtgaaggaaatattactaaagcactatttactctcggtataccaattatttttggtatgttcattacttcactttataatatcgtggatgcaatttttgttggtagcctcggaactagtcaaatgggggctgtatcaatttcatatccgattttgcaattaattataggattgggccttactttcggaagtggttgtgcgtcttatgtatcaagactgttaggtcaaaaagaaaatcatatagcaaaccaagcagcttcaacggcactaatttctagtatcatcatcggtattataacagtatctataattatgtgtttcttagataaaatccttactttattaggggcaacgtcgacaattctgatttatgcacatcaatttgcaattatctacattccaggatctattcttaatattattaatgtaactatgaacaatatttcagcgtctgaaggggctgctaaaattagtatgatatcaatgcttatgggtgcattgataaatactatactagagccgatatttatatttcaacttaagcttggaattcaaggggctgcaattgcaactgtaattgctcaaggtattacaaccatactttacgtatggtatatacactcaggaaaaagtaatttgcatatttctatcaaaaatttttgtccaagtaagactatttatagccaaatatttaaagttgggataccaactttattatttcaaatattatcaactgcttcaatggcattaacaaatactgctgcaagccgttatggagattcagcagttgctgcaatgggagttatgacaagaattatggcacttgggacgtatgttatttttggatatgcaaaaggctttcaacctatcgcaggatttagttatggtgccaaaaattataaaaggttaaaggaagcaatttctgtatctctaaaatggtcaactattttctgtataattcttgaagtcatttttatcatatttgcgaaacaaattgttaccttattcaccaaagatacctctgttatctcaataggaattgacgctgtgagggcaaatagcttaacatatataactcttggagttcaatatatatattcaacattatttttgtctttgggaaaagctacaaaaggtatgcttgctagtatttctagacaaggaattttctttatacctttaatgctcgttttacctaatgcatttggaataaatggaatcatttttgtacagcctctcgcagatatccttactacaatctttacaatttttcttacattcaagcttcaaagaaaaataaactctgatgttagatctaatgaagtaatattataaagactttaattgtataggaattattatttctcatttaatacagaacatgaatttcataaataaaattatataaacacctatatatattctcaaacaaatcaaaaccatgaaatatcattataagatacctcatggttttataaaatttaaaaatagtatagttaaattatcatatctaacattgtcttttcattaataccatcttcagttgaaattgaatatgatatatcatcctttttccaggttgctaagttatactcttcatttttgtttccttcaagagttacgtctatcccatttacttttactgtattcttaacttgataggtattataatctccacttatattatcagtgcttttacctgctctgaaaatcatattgttatttccattgttataatctacttgtatcattttatttgatatgacacttacattttctactttaaatccattagtcaatgtttttaatggactaatttttaaattcaatgctttttctgcttcatctaatgtcttatattcttgactataacctacatttttgtccattacaaccgatgtaccagagacactttcatctgtattatcttctgatattttattttcttttacatcttctggagctgttttttgatctgtgcttgttggatttttttcttctttatcattaatatcatctttatgatttgtttttgaagaagtatttgaattttctatagccttattgtcagtagctttattattatcattattttctgatgtctccctcttcttttcctctgatcctgagttagattgtgggttgtcttttacttcctgcccagcttttgaggcattattggtatttttgttcacatgattactgccattattattatttctattattttgatttacagctatttcttctttatgatcactgtcagatgcttctttactatcattattatagatcaattcactatcatcactagattttaagtcattattcttatcctcatgattttcttccacttcagtctgttctaaatcattagacgcatgtttgaaaagcataggataacttttagctacacttaaacatataagtattgcaccacaggctgccgccatttgcatatttcttttaacattatatttctttacttttggtatagtagtttcaacttttatttctttttcttcattgttatcatttttattttcagccaaaacattttggagtattctttttttcatatcatcattcatcactattttatttagttcttctttatatttcttactcaaaatcatactcctccttcagctctatttttaacatatttcttcctctgctaagtaatgatcttactgtagcttctttcttatttactatatttgatatttcaaccgtagtatagccttcataataatataaatgaataatttctctatatttcagtggaagtttcataacctgatttaaaacattgttatctttatattcatcataatagggcatatcagttaactctacatgctttttaaaccatactgatttcaacttatttttgcatatatttctggtaacacaaataagccaatgctttttgtgatcgtcgctttcaaatatctctatatttttaagcaattgtacaaaaacatcttgaacagcatcttctgcatcgtatatatttttcatatatgaatatgcaagcctcagcagcatatctccataatgatctaaatcttgtgaaataatttcatccgtacgcaatgaaacatctttcattaaaaaactcatccttccatccagtagcacaacaatgtattgtagatattcaactttaaaactaaatttatgtggtaacttaccgaaatcataaatattttgttccgaaaagctatgaaaatatcgccgaagattctaaggtgtagatttcaccattttagcaactaaatatctttatctaataaataccatatgaaacgttatagtattgcttaaatctatatttaaatctctttctaatacaagttctgattaacttactttatttaattgtaattataataatatgtaatgagaattatttgctagaatatataatcataaacttggttaatatgtatctatatttttttacaaaacctgttttgtacctctagatagaaaccagatacatagtttatatggcgttacttgaaatttatcttaataaatatccttagatagaggttgtcctagacattgcatctctaaaacttgtttatgaaatatgcataaatagataaaaccttcttcttcgaacattccagtaaaaatttcatcaatccatatgaagaaatatgtattgaatttctatcatttggggcacaaattaggtctttgtgttgattttctgtataactaaaaagtactttttacaatattaataatatcatcttgtttcataccatcatttagtgagatagaatatgacatattatttacgctccaaacagcaactttaataagattgtcatctccttttacttttacattgattccgtttatatttacagtattattgattttatagttgttataatcaccacttatatcataagctccttgtcccattctaaatatgatgtcattttgtttgtttacatagcatatttgaaataaatctcttgaaatagtatttatatattttatattgtatttacctaataattcttttggcactgtaatcttaaattttaatgctttctgtgcttcgtctatagtatcaaatctctcaataggacttattatatcatctgcatcttcaggtttatttactacagtagcagctggtttaccatcccattttccattttcatctactttatatccatctggggttactgtgcctgcagccatttctccattatttaataaatagtaccaattgccattagtttgaacccatcctctttgcattatgccattattattcatgaaataccacttattatttattaatttccatcctactgttaactccccattagctgaataaatccattgtccatctttatctcttacaaaaaagcttcctactgttttttgatcactgaatagaaaattataaaaattaattggaacatacaccatattatcctctattataggttctgcacctaattcatgcatcatagttaatcctattgctttgctgcttgagtaataataactatcttgtcccacataaacatttgtcttaattataccattatctaagcttataactttattatccttatctggctcaactttaaacccaagactctctgccgtaaattttagaggaaccataattttgcctttatatattgaaactccgtttcttccaatttcaatattttttccgcatattgctaccttgtttatatcaacatccttaggtgcatagtttgatattggaacagtatcagaaataatattcgctggattagatttgtgtcttgatatatcatctgctgcaaatgcttgagccgacatacccacaattgttactgctgttaataaacctatcattaattttttcatactcttatcttctccttctaagctcgcacaatctaatattgtatttatttttatgtgcttgcatcttaatttttcattttaggcacttgaaagaaaataacaagtccaaaattgccatgggtatatcattcgccaagaaagcggatatcactcatagtggaccggacatattagtgttatctgcctaaaaagcatggttgaatataagctgacagatggactagttactttttgattgcctttatattagtaatacaatccaacttagagaagtgttgcaaaaaaataaaaatttttataaaaaatcttaagatcataaaaaaacatgacttatatttaaaatatagtacaagaaattctcagtttccaaacataagaaaagaaattcaataagtttatccttattaatatatcaacatcctacataacctcttttcatttttataactacctttgattaaattcatattttcctattgtactaaatttaccttttctccatcacttaataaattttggccttcagtaatgatatctaaaccttcttcaactttgcctgttacttctgtaaatttctcatctgaaattccagtttcaaccgatatctttttaacttcgtcattatcaactgcataaagataatttacaccattctccattttgattgtttcatttggaaccatcaagatgttgtccttcttttcagctggtaatgatattttagcaaacatacctgcctgtatattgttattagtattatcaattttaaccttcacaacgtagaaattatttttagaacttgtatttgggctgatattatctattactccaactatttttgaatctggtaatgcatttatagtaactggtacagatagacctacttcaattttctcaagcatcttatcaggaacatttatttctgcacttagactattataatctataagagtaactgatcctgattgcgcacttgcaagttgtcctacttctacagctttttctgacacaactccagctattggtgcagtaacggtagcgttacttatttgattttgcacggcactcactcctgattgtgcttgttcaagctgtgcttcagcagcttttatagcttgaggccctgatttactcttcaatagctctaagctatcttgtgcattttttaagtctatagctattgcatcatattgagcttttgcgtcttcaaaatcctttttagctactgcttgtgctgaatacaaagtttgtgttctgtcataactgtcttttacactattatattggatttgtaactttcccaccaactgttccgcttgcaataattgctgtgtaaaccctgagtcgcttgttctttctaagttagcactagctgcactcactccagcctctgcctgctcaagttgtgctgcataatctgttgtatccaatgtaaataatgtttgacctacactaactttatctccaacctttacatctacagttgcaactcttcctcctgctttcggcaaaaccactacctcttttgctggctttaggttacttgcatattctacacttgtagaaatagttccagttgttattttttccgtttttacatttttaacctcttgtactacttctacgggtttctttttatcaaagatagaaataactatgactacaataattgctaaaactactcctcctattaaaagttttttatttttctttaaccctttaaatttcataggtgctacctccttctatggtatgaattttcttctttttaaaagatactaccttttttaaatcatccattaatgtataaataattggtaatacaattggtgaaagtattgtcgatgcaaccattcctccaatgattactatagccatactctttttcatctcagttccttcacccatggataaagcaactggtaacatagaaacaatcatggtagcacttgtcatgattatcggtcttaatctagtagcaccagattctataagagcatctcttaaattcattcctctcttcataagggtattagtataatctataagtaatgtaccatttttagatgctaatccttctaacataattaatccaattatggacattaaatttaaagtctgtccagttagagccagtaaaccaaaagctcctataatagcacaaggtagagccatcattcttataaatggagttaaaaaggactcataaagcactactaaaatcatataaacaagagctaaggatgcacataaagcaagtccaagagacgaaaaactttccgccatctgtttttgatttcctccaaagcttatactatatccatcaggaaccgaaagagcctttagtttagcattaatatcatcggtaacttctccaagaacccttccttgaatattagcttcaacagttgccatatcctgcttatcctccctagatatagtaggagcactatctatcttttgaatggatgcaacttggctaagtggaatttgttgtcccgatgaatttgtgattttcaaggacttcagatcttctgcactctttatttgtccattttcgaacttaagggttatatcattttcctcattttttgatctatacactcccacattagttccagcaagcgccattctaacaacacttcctatgtttgtagtagaaatattgtactgagtagctgcaaggctgtctatatttaccctaagctcactgcttcttgaacttgtagagttacttatatcagtgattcctggtactgcacttagtaatttttcaacctcatttgatagatctcttatagtatctgtatcattaccttttattttaattgatacaggcttactactaccaccagacgaagatgactctgctacatttaaatctactccagacatatttttaccaaatctgcgaatctcacttgcaagttcactttggctttttttacgttcacccttaggaactaggttaatgaaaatctgagcaatggatttatctgctgttgcttctccatcatgcccaattaatgaaaaataattttttacttcttttgtatcctgtaaatatttctctacctcagagaccttttcatccgtttgttttaaagttgatcctggtgcaagcttcatgctaatttgaagagaactctgatccgccataggtataaactccgactttattgcccccatcggaataagcatgacactaagcacaactcctgcaacaactatagctaaaacttttttcctgttatctaaagaccatattaaagcctttttataggtttctactagtttatcaaaagagccttctgttttagcatttattttgttgaatttagaacttattattttgataaatttaaaatttattttgcttaaaaatttagatttttctttttttactaacacatctttaaggttctcattttttaatagccttgaagaaagcattggtgtaattgtaaaagatacaattagagaaaacattgtagctgcaactattgtaagtccaaattccctaaacatctgcccaactaaacctgacacaagtgaaacaggggcaaatacaacaacatcgcataaagttatagctattgctgccattccaacttccttacgtccttcaatggctgcagctataggattttttcccatatccatatgccgctgtatattttctataacaactatagaatcatccaccagggtacctacaacaagagataatcccatcaaagacagcatgtttaaggtaaagtgcatctgatacatcataaaaaacgtggcaaccagcgatgttggaattgcaattaaaactactaaagaagaacggaaactacggaagaataaataaagtacaaatgcagtagttatgataccttctgcaagattatgttttatttgagtaagtgaagaattaataaaagtagtagtatccattaaaatatttacttccgttccttttggaagtgtattttttacatcttctaattccttttttacagaatcagcaacttctactacgtttgaatcactttgctttccaagcatcatcgctatggtcttgttaccaccaaaccttgttaatacatttgcatctgggacttctaagtcaatttttgcaatatcaccaaggcgaattgtcactccattacctgctggtattaatagatttttaacttcatcaacgctactaaattgcccaataattctaacagattgatctaagccttcttgcttaatctctccagctggtacattaacgtttgacgcctgcagtgtgcccattaaagtatcaatgttcactccataatactccatagttgctttatcaatttttatcattaattgcttcttatcagcacccagcaatgaaatattccccaccccaggtactttttctaatctttgctttaagatatcagattgattataaagttcctcataactggcatccccatttattgaaactatcatcataggtatggaactcatatccattttatataaaataggcttatctgcagctttaggaagttttgcagaggtaagttcaactgccttttggacatctaaatatgcggtgtttatattcgcactcattttaaaagttattgtaacagtaccatagccttctccagaagttgaatttaaaacatcaacaccacttattcccgaaactgcatcttcaattggttttacaatatcttttttaatatcttctgcactagcaccattataagttgtcattattgatataacaggaatgttcatagatggcattaaatctgctcccatgctttcataacccatgatgccaagtccaataaataagattactgccatccacatggctgctggtctttttactgatatttcagttatactcatttctctccccctaactctatgttcataaagtgaaacttttcaggtgaagttttcttggtgccccttgagggtaaactccatctgaatttagttgaacttatccaggagcatgcagccgttatctcccacttaagcagataagtgaaagtccaaatttacaatttgataacttgaacttagctaactcattcatgagttaaactcatcaaaaattgaattagtgtgaatcacttcctcatctgacgcaaggaataggatcttcatatattgtgatggtgttacggatgctagctatcagataaatttttactcattatctcgctcattctcggtatgtcattatttagaaaaaacgaagaatattgcccatacatttaacacaaaaacagttatgttctaaataataccgattcttacatgtatgctgcacgcacccaaattagaatagctttcttcttaaatataaacatttaatgttgtatttcatattccaatatttttaataattttgatacttaatataaattctgtacattttactgctaaaaaagagagcttactacacataaactctcataaatttattatatcctctgtatctccatttttaacctaatatttcttttcaaagaagatctactgccaaaagtgcatcatatgatgtctagataagttcaactaagattcagcttgatatttcccctcacctgaatcaagtttcactcgataaagattaatagcataaacatactaatcgttttctgatacaaccgttgttccagaaatataatcatgaatagccctatgtgatagcgtacttaaaaccaagattccggacacaattgttaaaattctggctgctattcctagatagtattcaaaataaaaaccggtcacaagagtaagcagctgcactaaataacttgttataataattgcagttccctctatggccatgagccctataatttgtcttattaaaagggtttttaaatctatctctgaataatccatttttacgattttaatcttaactagatgctttccaattgtctgaccatggtactttttataagggatatatacataataaattagggctgcaatgaaacagagactaccagctaaatatgcccatccgtttgaatatcccagactcgcaaacacatagagattgctaaacatatcccctttctttgtcaccgaactataaattaaaactgcagggaatcctgtgataattcctcccaaacaccagtctatgacgtaagccagtagccgttttgatatgctcacattcgacggcttcctatccacccatgatgtcactttttcccatgatttatgcataaaacattcctcctattttgaatacaaataatccatggcttttttaaagcgctctaacccttcttcaacctttgaacgggggcatcctaaattcatcctcaaatattttgcaccattattcccataggtttcacccttcataatagcaactccgcccacatttactagagcatcctgaatctgctcagaaatgaatggaactcctcttccatctatccatgccaaataagtagcatctggttttttaaatttgaagtcaggcagctcactcttaataaagtcctccaccagctgcatattaccacggatatagtcatttaactcatcgatataatcatcgcattgcatataccctaccattgtcgcatacattccaaatatacttgcagaattcagaaaatctctcttcctagtatgatataaaaaatcatttctcactgtctcatttggtaccatcacatatgaaccaatcaagccaggggtattaaatattttactggaagaagatgctgtatataactcatcataatcatgaatataggataaaagtggtatttgtttcttttgtccaatctgtatatccatatgtatctcatccgaaattatctttgtattatattttttacacaatgatattatgcgtttcatctcatcttgtgaccatatcatacctgtaggattatgtggagagcataaaagcaatattctgcagtcctgtacctgtttttcaaatagatcaaaatcaatttcaaataaaccttctttatgaattaaatcatttgataccaatatgcgatcattatcctctatgactgtaaaaaatgagtcatacataggattaaatgtcaaaatcttatcttttggagcacttagcagcctgattaataatgatactgaatacataacgcttgtactatataaaatccaatcttcttcaatgcatgtattaaatcttctcttataatgttctgttatagaagatttgaaatcatgatgattccacctggtatatccatatatctgatggctggcaacttgaagaattttttcagtaattggttttggaatagtaaaatcagtatctgaaattgaaaatggtattaaatcttttttatgaaagcgatcttcaatataatcccattgtgtagaataggttcctaaacgattatgaacttcatcaaaattatatttcatctatttcacctccaaaattatataatcctttgtagttttattgaggggaacacctctgccattaataataaccacatcatcttcaatacgcacgcccccaatatttggaacatagattccaggctcgcatgacatcatcatatgttcctttaaaatagtcttacttgaagaattcaaaactggcaattcgcagccatcaccgattccaaggccgtgacccagtccatgattaaaatactgcccatatccgtttttctcaataacatccctggcagccttatccacatcactagcaataactccagcattaatagcgttcaatcctgccagctgtgcttttaaaacaatatcgtaaatttctttaatcttaggttcaggttctcccataaaacacatcctcgtcatatctgattgataatttttatattgtattccaaaatcaatcataattggctcatgagccttgactctgcgtccagttggcctgccatgtggaaaagctgtcctttccccagttgctacaattgtatcaaaagacatttgctgagctccttgtttaattgaataatattgaaccaaagcgcttatttcatactctgtcattcctaaatgaatatttgcgagcacctttttataaatatggtctgttatatcaactgcctcttgcatgatatctatttcttcctgttgcttaataatacgtaaatcagctatttcgtcatctaacaaaataatctgaacaccaatcttttcaacatctctgtattctttaactaacatctgagaagcttcaacccctaaattgtggcaatgttctttcttcaatatatcttgagctgccgctagataactgcatcccatttcatgagatgagtgaagaatgatttcaagatcatgttctttttctttagcctcagtcaaatatctcccatctaatataaggaaacctttattttgagtgattaagacattgcatccgctacctgtcatagttgataaccattttttcatggttttacttttaataagaagagcatcaatattattatgatgcataaactcatgtattttttctattcttttagccatattatcaccatccttaaaaatgaggagctgtcacattaaagaaatttaactacaatatgttgtcttaagatttaaaaatctaatccaatatatcgtgattttgttctttgtgctacagctccttctttttagaagtccaaatcgagatcctttaagatttcttcatcttctttagacatgttattcttatcattttccttttgttgataacgtttttcatatatcttgaaaaatggataccatacaacaagtgataagactaattgaattgcatttgcaacaatggacattggatccatattagtaagatatccctctaagaaaacacccacataaggaggtgtaaagaatgaacagcttaacattccaaagttcatcatccaaccagggatagttcctataattccaccacaaataacgtatggaataaaaaatataggatttaatacaattggagcaccaaatagtattggttcgtttattccaaataacgcaggaattaatgcaacacgtcctatctgctttaaggcctttgatttagataataagcaccagaatactagaccaaatgttatacctgttcctgtaaagttaccaaatgcagactctggacctggggcgaagaaatgagtcatggctaatccggctttatagttagctatattttccgctaggaactgagtagaaattggagttgttattggactcaatacagaaggatgaattccaaagaaaaataataaacattgcaacatctttaagaatgtataagacaatggattgtccattgagcctactaatggtgcaaatatgcttgtaaaaattaatggaggcatgatattaaacacattaacacacacaatacgaataattaagaagaaaccaataataataactgatattggaatcatttcaaaagatcttgaaacaaaatctggtactgaatcaggcattttaattgtgaatttcttcttcttacaccagcgatataattccactgcaataattgctgcaaacattgctgcaaatagacctttaggtcctaaatatttagtcataattccgccatcttttgtataatcaacagtcatcataaggaaagagataaccgccatactgatacaccctggtacatccagcttgtaggaattggcaagatgataggccataaaagctgtagcgtataaggccatcagtgccatacctacgttgtaaggaatataaataatatcaagattagctaatatccattgagatattggattattctcaccaatcatattagggatggcttctggaattaaacaaaaactaccaataattaacaaaggcattaaagctaccatggcttttttaatggcacttaaatgaatttctttatccatcttgttagcaagtggcgctaagtacttgctcataaaagcttcaaacttgttaaacattattcaacctccttactttatttttttcatatcagcttttttacgttctataagaactttttttaatactgttgctccatccatcttgccataagtctccttatctacaacaacataaggaatctcatgtggatcaataattgatttaatataatccaacttatgtgcaatttgtggtcctacaacaacagcatcacaaccttctacttcactttcaagaatatctacagggattgcaatgaatttaaaatccttctctttaagtttttcactttttttaatggtatttttcatactgtccataagcatagtagttgaaaagcctcctgcgcaacataatacaatcttcattttacttttcctccctttcttcaaatacatttattagcgcctcaattagatctctagctaattgagctgtcatgtaatggtcttgtgcatgtaccattaataacccaacttcaggtttattttcgctatttgacaattcagcagttataatctttgtttgaatttgatgagctgccaaatctgcctctctggcttcatttaataatttgcgagcctcatcatactctttcgtctttaccttttttaatgcttcaaaagatttcaccttactttcaccagcggaagaaatcatctccataataatgctttgttctacttcagtcattttcatatcctcctaaaaaatctataaatttatcgtaatctttacggtttaaacgataacatagctcatgtacaagtttaattaaattttccaaatcatcactatggacaaaagaatatgcgccatggcaataccgtagtggtattcctaagaccaatgatagttttccgcctcgatctaaatgtgcatttccagcatcagttcctcccctgctaaacatatcgcattgatatggaattcctttttcatccgccatattaatgatataccttaggagctttatattaggagccattgtcttatcataatgcacaatcattggtcctttaccaataagacgatgatttgtataattttttgtaagttctggattatttgctacatctaaagcaaaaactatgtctggattgattatataagctgaagttttcccgcccctagtcccgacttcctcgctgcttgttccaacgaaataaatgtcattttccaaatcatctttcatactcttcatggcctcggcaataacatagcagcccgccctgtcatccattgcttttcctatataaaccttttcatttgataattgtcttgcttcacttgcgaagcaaaccatattgcctatttctactcccaatgatttaacctcatcaaaattgtcacatccaatgtcaacgtacatatcttttatatttccttcactatctttcgtaacatttaacagtccctctatttttttaccagtaaaggttgttaatctaactaactgcatttctttgcttttatcctgcaccccgccgacagctataagataaataaacccgatatcagaaatactgcgaaccataaagcccacttcatccatatgggcgcagagcataattttcagtggattctcacttttcccttttttatgaaatataatacttccaattttatcacaaaaaacctcatcactatattttgtaagttccttgtataaaatctccctgacttcattttcatttgaagctatactgtccgcatcacttaatgctttcaataaaatatcattcataattaacaccgcccatctctttcataactgccataagctcttcaaaagatttaacacgaataactctttctaagtattttggctcccgcataagctgatacaactttttagtaatgtctttatagacctcaacctgttccttttttaaacaaatcataaaaataatccttacttctttttccaaccatataaagggcttttttaatatactcactgatattgtatttcttaaggcatctgtttcaataggatgaggtatgcatacgccatttaaataaatggtacttatgaatgcctctctttccataactaattctgcatatccctccttgccatatcctttcttttcaagatcttctgccatccctctaatgagatgttcatagtcatcttcttctgttatattgaaaaattcttttgagaaataggagtagtatattggattttcattaatcaatgtatagggatcataatcatcgcactgcagaatctgcctgattctatatagatctttatcatccagaagctcttttatataaatgacaggtatatgggcatcataagatattggtataactgtaaaaataatatcgggtttatagctgatcatctcatcctgctgcaaaaaagagaaagttttgacttctgcctttggaaatatggattcaagctgcattttaatcatatatgcacttccaccgccagaagagcatactacacagattttattgtaagattgaagctttagctgtttctcctttaccatatgtgctgcaaaatgcatagctacaaaccctatctcatcaaaggtaaattctacattatacttttcatgaagaatgtcacaaaattggattgcgatattaaatatcatgggatatgtgatacttaactcatttgccagagcatttttatatgaaattttattgtgaagcctgtccaccaacagggacatatgtgaaagtagaagccgtttcaagtcctgatcttcaaaaaagtgagtatcataggtttcatctgtttttttcagaaaaacttctatatcatcaatcagattgtcagtaaaggaaacatatgcatctttcctacggatatttttcttcataacttctatcaattcctcaacgctatccttatcaaagcatacattatatttcctttccattgtattaattaatgatgcagcaattttttcaataggactagattcatgaaattcatagtcttgaacatattgcttattcccttttagtgcaatatataccattaattttagaaaaactatcatatttaatagttcattataattaatatttaatttttctctgttcatctctcttattaaatgagactcaacatttgaaaaatcaattacaacaccatcaacagccattcgaacaaatacgttttgagtttgatattccttgcataagtatttattaaggtatctatccgaagaaactattctaattccatgatggctctttttttccaaagccatatggtaacctttagctagttcttctacctttttaatatcatgtttgattagtgttttagaaacttgaaaagtgtctgcaactttatccattgaaatgtattcatcttggactgataaaaatgccagcacttgagatggcctttcttttatcttaaaaacaatgttttcatctaaagttttaagaaatttcccgaataattcatcgtccttaatctctaataaatatcccactccccttttgatatgtatttcaaatcctttactagctgaaattctcatgagatatgaaatgtcactttgaattgttcttttagatactttgtatttgtgaataaaatattcaattgaacagtaatcttcattgtctataaagtcactcattatctgactaaatctcatttgaactacactctcctatcccttatatttttattatataaaaataatcttttctataaaaggagaacttttgcatataaaaatgcaataatcttcctaatatatagccaactcacaataaaatacttctctaaatatcaatcattattcaaaatactgtcctctctactattgtatctctaagggacattttatgaaaatcaaaagtaatttcacttatccttttattctttgcagtcaaaacattatccatataatcaaacaagtattattccacaaaatattgttctctcattaaaatacttttctcaatgctcaattaagtggtatattataatggaatttaattaataaacataagaggtaatttacatgaaaacaatagtaccccattattataaagattttaaatgcatcgcttcaaaatgtactgatacttgttgtgctgggtgggaaattataattgatgatgaaacatataagaattataacaaggtaagtggtgaatttggtgaaagattaagatcaaatttaacattatatgaagatggagagccaggttttgtattacaaaataataactgcccatttttaaataaaaataatctttgtgatatctatactgaacttggagaaaaaagcttatgttatacatgcaagacatatccaaggttaatagaggaatatagtaatttacgtgagatggggatatctttgtcctgtcctgaggctacaagattaattcttcaagatcctaatccaattacttttgaagtttcagatgattatgaaatagaggatccatatgatgatataaattttgatatttccgtgcaactaatatcagctaggaaaatggccttagatattctacaagaccgatctatagatttaaatcataggattgcattagtaattaattttgctcatgatattcaagaagaaataaataaaaatgagctatcaaaaattaaaaatatagtaaatagatattctagcgaatcttataagaaagagcatcttaataagtttgataagtataaagcaaaacaatctgataagtataaaaatatgcttaaatgtatgaatgagtataaaaacctcgatcctattaatgataactggccacaaatactagatcatgctattgaatgtttttacaaaatagacgatgttactttttataaaaaacaatatgatgcttttaatgaatattataaaactaaaacctatgaatatgaacatttaatggtatattttatattccaatattttatgaaagctatttttgatgaagaattatgctctaaagttacactagctgtcatgagttatctcattattaaagaattaaacgtagtacgctggattgataataattataactttgatataaatgatcaaatagacataatgcacatgtattctaaggaagttgagaattcagaaaaaaccctttatgacctcgaggaaatgtttaatacaagcagaatatttgatttagagcaattacttattttaataatgaattagaaataatgtagagtatatggaatacttatctttcacattaacgtctagtattggtgctatactctcattttgactattattgattattttctaaaatttcaaaaccttgtacagtattctcagttgaagaatgatctatacagagtcttttagttaaatacactatgcatttagtatatttttagctttgtatcctgttttgaaaagcaatatacgaaatttacatgtagatacattagacatttgaatatttacagttaaaggtatataattaaacaaatataaaattaactatttgtgtataaatctaaggagatgtatttctagtgaataaagacgatgaacctaggcattggaaacttggaattttctactataatccagataatccatctgaatctgttgataagaggaacggtataggaagcactattaatttgggaagtaaaattggtagacgtataatggcatctattttgtctattccagttataataatattattagtatttgctgcttttagatttttttaataatacaaaattttaaagtttgaatcagaatatacttgtaaattgacacgtttaagaagtaataaatattggttttaggcgatagtataagaatttttaaaatataaaggattaaaaatattaagcgaagttaattaaaccagcctcagtatttttaatcctttactcattagctataatgcttcatataaattttataatactacctaaaagcccttatttttaagatctcatacaatttccacatatttttctattacatcaaagtctttatagtcatctcttcttagatctataatatctccatgagagattccacgctttcgtttatttctcaatacccctttaaattctccccatttagcagattcaatagataccagaccatcattttcaccttctgttaactttaccaaaatatatggtattgcaacaacataatcactaaatatatttcttactacagatgtgtaactttgataatacaccccatctacgtcttttacctcttcattgaattttttactatggtaagttgaaaactgtctgcttgcagtataaaagtcaggattcttatcacctagaaatctataacggttatcaaaaaatcttgcaatggatttatagattttatcaggaattttacaagcaagatcaacaaacttacatcctctgtgtagagatgatatcatggttaatgatgcaacgtaatctcccatttctaacttactaatcatataacgtgaatctagtccaccttttgagtgcgcaataatatttaccttttcgcatcctgtttctttcaatatatctaatattttattttttatatcttttgcattatactcaactgtgccccaggcttcctgatttccataataaactgtggctccattacgaattaactctttaggtatcctgccccagtaattgatatattttaaatctctaaaacctacaccatgaactaatacaagaggatattttgttttacatacttctgaatcaactcgcgcttcatgattaattactttataacactcatgatcatactctattgctgcaatgtgacaagcatataacatcacaaaaatacttacgattggaataagactccaaaatcctactataagtctttttacaatatttaatcttcttgaagtacataaaattcttagcattccattgataattaaaataataatgtttaacataacaataatactatcaattactaatatgtgttctggaattgctaatctttgcatcattgtatttcctattaaatatataataatttgaacaaatgctgtatataatccatataaaacaagacatcttccgcctaacattattcttaatctaaagtttactatttgctttttattatttggaattatgtttacttttataaaaatatatagaataaaaataattatctccgttaaaatagcccatctgtatatagcattatcttgtccaaatttactatgttggattaaaaaatatcctaacgcaacaatatgtggcgcaaagataaaatatatatacattaaaatcttatgtagcaaatttaattttttcgtgatatccaagaatatggcactaagcgttatcagtgttaatacaaaaatcactataatttcggtcatattttctcctttctttcattataattcttattaaacatttcaattttaccatattatgtgataaaaccctataattttaagaaagatatgtatttaaccaaatttatcatcttacatcttatctattaattaagttaaatttaaaaagaagcaaatttcagatgaattttgtgcagtgaaaatttcttcatgtatctgtactttcaaatgctgtgataagatctatctgtttcattcaattcatgtataattccctataatctattgcttatatttcttaattatctaacattttatatatcaaatgattacaaaagtattttttaatgatattattttagttagaagaatcagtttagttaagtaaattcttagtcaataatataagtaaaggaggctttataatgctaatagatccaataaaaacttatacctataaagattatttgtcttatgatgaaaatgagagaatagaaattatagatggagaaataattaatatgagtccggcgccaagtagaatacatcaggaaataataactgaaatactttttaaaataaggcaatatattcaatctaataatggcccatgcaaagtatataccgccccatttgatgtaatattaaaaaatgatgatgatgaattgatcagcagtaaaaatatagttcaacctgatatatcagttatatgtgataaaaacaaattaactgataaaggctgtactggttcaccagatatgattgtcgaggttgtatcgaattttaatccaagaaatgattatatacgaaaattaaatctatatgaacaatttaaagtcaaggaatattggattgtaaaccctatgagaagaaacattttagtttatgtcctaactgaagatggatatgatgctccaataacttatacctttgcagataaggttaaagtaaatatttatgataatcttgaaatagattttaattctattgatatttaagataacatatttaaagctaagattctctaaattcaagaaaatcttagcttgatttattcttactacgtctcaatacctaggattatatttaatataaattttttatctattaatacaaaatagagcaaccattctacatttaacgtttctactatttagtcaacaggaatgtatgtagccttatctctcggagctgaaaaccaaggttcaactgtatttatccattttttaaagtgttcggtttccatatgtttgttcacatcgtcttctgatttatagccttcgtaaagtaaaaacttagttgaatcatctttgcattgaaaaaaatcaaaacatataattccttcttctttcaatgaattatttttattttccttggttgatttaataaattcatctagatgctcttgttttacataaattgttacactttttactatcataattaatcccccctttatatgcagtataaatttttaataaactaattatagcatattagataagtatttcattattgactacagatagatgtatattatatatagcattttctaactttataaactgcttattcactgaacattttttgatcttttttactataacatttaaatcttctaacatgaatattttctttgcgcattcacataataaatttagttaataaaattatgaaggagtgcaaatcgatgaaaaaaattatttttatctgctccatttttttattcttatcgcttaacctaaacacaattccttcttttgcgtctccagctcaaaaaacattctcacaaggtatttacagaatgaaagatttaaatctactcccaaatgttgcgtatactgctcagaatgtttcccccactgaggttttcttaattatattcgacggtagcaaagtaatacaacaatccatacgtttagaaggcaattcaatacattatgttttaaggccaatgaaagaggattttaattttgttgtattgggtaatggtcaattagtttttactccaacaaacataactccataatagtattttgtgtttttacgataatttatcgtaaaaatatcttcaaatttattaaaaactatgataattctattttctgttaagttaaagtgcttattttcccccaagtagaggggcttttttagctagatagagattcaccttaagttaaattgttaactttttttgtttttaccttcgtaactttttaactttttaaattttaaaaaaggtttatttaaaataatattcatttaaatgaatgtttaatgaaaactttaaaaacttaattatttttaacaagttttctttaaaacaatgtacctttattagtattacatataaaaaatgccgtaaattaataatacggcattttttataattgctttatattcagttttctacaagttttaatatctcattatttattacatcaggatgtgtatgatatatggcatgtcctgcgccattaactattatttgctcgctatttgttgaccaatcttttaattcagcttgactattattccatacatcatcatctggagctgttaaaattttcataggcaaatcacctaaattcccattttctaatacagtttttgcattactttgtgctaagttaccctcatctataatattcttgttatacatagtcttcaaaatcatagataaatatgtttgctgtaaattatcggggagtaaattaagatttttagaataattatttgtgtgattaactactagtcttgctactcctatggactttaaaaacttgtatgtataagctgtgctcttagaaatttctagtccattttccgcatagtactctggattaccaccatctattagaactattcctgaaacttcatttttgtacatctgtgcaaatcttattacttgtaaagatgcatatgaatgtccaactaatatataaggagctttttgtcctgacttttcaagggcatcatgcatttctttcactatagtatctatatctctttgttcatctgtaacttcactccatccatgaccaggcctatcgtaagttattaccttagcatactttgaaatttcgctatagaggggataaaaatcagcataggaattaggttctgtatgacctgaacaaaaaataacagttgaacttcctttaccttcgctaaaaatattaatcttatgattatttacttcaaccatttctccaactacaggaaattttttcgcgtctctatattcacctattttttcataagcaaatcctacaactaaaattaatataacaaaacttaacaacgcatattttatggatattcttttagttttaagcttttgtttctttttccatttattaaaatacatttacagacacttcctaaaaatatcataattttttcattcataatagctatagccaatcaccactataacccaatatttataaatacttcctaaagtatagcatagcgttaggtaaaaaaagcttttagccatgataattaataatttcttaattaattcatcatatttaatcatgcttataataatttctctattattctcataaatgtaagtccattaatacaaatttttccaagcactgtagtgtctaattttcaacgattattttatttccatctgatatactgtcatatttatttcataatatcctttcttttataaaactattttagtttagcttaactcagattggactcatgacctttcatatttcaaaattgcaattacattataaaattaaacttttatagtttattgatagaaatattatcttaatactatctactattaactaacggctctatcactaagccctctccttctatatatactacatattaagccaaccattgatatacttataatatagtcaatacttccaaaacaaataaatggtaaactaatataaatccccataattccaagattactaagaatatttattattgtttgtgcaaaaaatacatatcctatggacaatactagcattcttccataagaatccttaacttttctcatgatattaaatattcttgctacaaatacaatcattgcagatatgcatattcctccaaatataattccaaaattatatatagtatatattaaagcaaaattactttttacatctccaatttttaattcttttacacttaatttgtttccaagcaaggttacattagacaataaatttcttatcctattagcagtatagccatctccaagtggatcttctgttggatttataagaagaatatagatacgtttcattatgtaaggctcacgtaataatagcaataaagatactattataaaaaatgtttctatataaattaaactcttttttaatgacttactaactttggatgataaaaaaatcacatttataccacataagtaaactaatactacagttttatcataagtattataaaatataactaacggaataattgccatagttccaattaaagctaaatcaatcttattattcatcctcctaatatttattattccacttaatcctattaaaaccaatgttactactgacaagtgaactgaaacctcactaatagaaaattcaccgatttttataacatgataaatatttgctttcattgacgaaattattaatatgataatcgatagccaatatatatagtaactatatttttttagctttctataatcaaagaagtaaattcctataccaattatccctcctataattaatccaattatattatttaaggctaaatcatagactgccgaactattttcgctcatcgaatacatggtaaatatgcctatgcttgctaacgccatagccaatattatagtagttatatcaggctttgctctatgtaccttatttaacctagtgccacactcataggcacttccaaaccttttaattgctttgtctattgattctacttcttcaagtccatcattaatatactcatcagcaatttcgctaatatgattccttatttcatctgaaatttcttgatgtatatccttattcttaatataactgcatacatcttttaagtagttttcaattgtatcgtttcccataaccactattcactcctattcagtaattatcttgttcacagttgctgtaaacaatccccattcatctttcttttctcttaaagcttctcttccctttttggttattttatagtattttctttttcttgaattttcgccttccttccaaaaggattcaactaagttttcttcttcaagactatgaagtatgggatataaagtaccttctttaaaatcaaaaactccactagactttaattgcatttcttttattatttcataaccatacatttcatttctctttaagagacttaatattaggatatttgtgcttccttttagaagttctttatttattttcatcacgcgacctccattaattatacctagtatatctatgtatatagattaacataataaccttatattgtaaattaattctatattaaaaatttcacttataaaaaattatagtaaactcaccactgccttgtgatataacccaatataattgcttataaagcattctaaatatatgtagagcatcaatttattatttgcaaaaagaagaagtatctttgtcttcttagatacttcttcctaatatgcagctatttaattctaagttttaaagtttattattatattaaaatccaaaatcaatcatagcatacctctctcatattgtttgctcaggtaaactagaatttgttttaatattttttatactataggcacacaaatttcgcaataatggttacttatcatttgcatggtataacgttcaataatctttcttttatcatcaattttataatttctttttgctaactccgaaaatatttcaatccatgctttttgtatagcatctactgtatggcttatcttaaacacacaatattttccacccatagtttttccaaagttaatattattactttcaaaatgaaattgttcagaaacaactagacatgcatcgtaacggcaatctgcaggttctgtgattccaggattatcttgagctattcctaatattattgacctttcattaaataagctattttctgtagcccagcttttcaattgttccattacttgcacattttctaaaccataaggacctacttttctcatataagcaattttatattctggtattatttcaatattaatatccatgacttgccttctttgttaataaagtacaccggtgcctgaattcataatataacgctttaaaatgtatttcaacttattttttaaaattactaaattaatagtcattataagaatatatagtgtatattctcattttgttcactagagatatttttctattttacattgttcatatatcttttttcctaacaaagtaattgcctgcttagggcaattactaatacacctgtaacacatggtgcatcttcctttttgtgctaccttctggtttacaatagttaagtttttcatcggacatagttgcgtgcaaactccgcaagaaacacattttttattgtctatcttcagcttatttgaatattcttttgtttttccatagaaccaaagtctttgccccaaaatacctgcaatatgatagaaaaatccaattccgtcttgtgttgcattattctcttttatgagatttgcagatttttttatctttatgtgcgcttgctctacaatagctttattttgctctaatgttttctttaatgccctttcgtcacctatacagtcaggcatttttagatgtagtccgccaacaatctcagcaccatattttgagagtaaccttgcactacatccagccccatcaccactgaataatcccatagtagcaataataaaaacttttttatccataaacttttgtttattctgcaaaataaaatctctcattattttaggtaagttgctgaaataaattggatacgctagaacgataaagtcacttttttgcatttcatctagcacactctcatcttcaattgaaatacttttcgctgttgcatcaagttcttttacgaacagttcaatacaatgttttgtgttgcctgttccactaaaatatactcctaacatacttttaatctatcacttctttccactaccataagactaatttataaatatttctaaaatctaaatttatggatttaaaattatctctacaatcctgttttctattttactgaacagaaatatataaataacaatgtgcatttccatcttttgtgtattcactaggaacagtgatttcataatcctccgaaaatgctctctttatagctcctaatttttgctcactccataccctttcccatgctttttttgcacacacatctactttcccatcttcatctctttcagcatattttttatatagccctgtactcactttcatttccattttctcaaagaaatcaggtgttacattcattattgtaaggtcataatcccctctttcatcgctagaatagttgctatattttgagattggagaagcatctttttgaagtatatgttcactatcaaaaagaagaggtaatttaccacttgcaatatcaccccatagttcatcaatcatctttattccctcatcagaattattagttcttattgttatttcttttaatttatatgccatagtatttctcctttattgtataaatgattattaatttaaactcttgtacaaatttaagtctattatttagttaccgtatatcttaatactgtttttaatttatctctttcaacttttctagcgtctgatagatatatttccctatgaactaagcttttaatttttaaattattttcgttaatatagtctttcatcttactaaatgtttctggctcattgtcataagaatctatgtgtagcatttgaactgataatccatcttctatttcatcaaaataggcttcttttaataatttatcaggcttcttcttattcgcaatttcaaaggctttcttggccacttcatcgcttacaaagcttggttgctttatcattatggtatatatcagttcatctttattaaatacatcactactcttgcccccttcagtcatatcccataatccttctaacggataaacagtatattcaaaatatccatcaggtataaagccacttttaggcatcattcttactgcataagcaagagagtataatacagcaattctattagaaaaatcttcatcattcggatttccttctcccttaatacagaaatattttgctttaggaattttaactaaagtcggtttttcttttggcagataaatctctttttcctcttttctccattcatatttcaaaatcaacacctccataatcattataaatttctaaatatgacaacatactgtcatattataaataattcccaatcctaacaccctataagttcgttaatacttatattaggatttctatatcttcttcttttcttagttttacttctccattgaattgcttcttttggacagtattgaatacaagctgcacactgctcgcaattatgtttccatgttggcttattaatattaaactgtatgttattgacagggcaaattttttcacataatctgcagccattacaattatcatcaacccaaaaatctttatctcttagatgtaggtttttcactatcttgtcagtagttttgataaaaatcctatcaattaatgtatcaaatatcaatgggctaacttcacatttgtagttttcgtgttttgtaactatactggctatatattttactttatgcttttctttttgaaagattttgttttgtttttcaatagaaattgatccaaaggcaaaaatattatttaatggcatatggagtaaaaaaccagaattaagcattatattattattttgtaataacttttttagtttatttaatacttcagctggtgttccaccatgagttgctactgcaaaaacgtacgtatctttatttatttctagcttttctataattctctctactaccaatggcaaacgattatagatcacaggaaaaattattccaagtgcttttccttcaatctttattttttcttttgctacaaatgaagttattttgcgcaaattaaaattgcctaattcacgtgctatatcattagctacttgcaagctgttacctgttcctgagaaatataatattgtgtcctcttctattatcataaaaacctcctatttgatttacataatcaagtaatttactaacaactcttattatgaaaattttcatatttaaatacatatactagtttttattgatattttaaggcatgtactatactacacagtcaagatttaattttcagataaacttccatatcaccacagcattctaaattcttatctaatatatttttctttactttttcaagcagattttttgtttctataagttcattcattttactattaatatcatttatcttatttccaacaaggttcctaatacttgtaatatcaccacataagacttcattatgtattaatgtacttatttcctttaatgagaaaccaaattttttaataataagtataaatttaatcttttctatatcttcgtccgaatataacctatacccgtttttatcacgtttagtttcagagagcaatccaatcttttcataatatcttatagtttctttgttaatattcaattccctaactaattttccaatattgtacttgtcttttttcataattcatcttcctcaaatttagaattttatattatattaaaaatgatattgtttaatactcaaccttaatttacaccacgcaccaattataacatttattgaaaaaatattattagcattgcaaaaaaatgccacaaaactcattatgaataatgtggcatctcgatttatgcgtatttgggtttaattaacctaatattataatatatgaatatcatcttaatcaccaaatattcttgtaatttatatcaaaaagttaagtactaaatttctaaactctttcctgttactaaacatagctgggtgattccattttaaattgtaaaaaagttttaatgttagaaatattaacgctatccatattaataaaattggtatggcaaaataccaccttttaggttttccactaatccataagttttctgcttcaattttacatttgctaagtatttcttctggtataaattttattgttattgcaataagtatcggaagtaaaattatatcatctagcaagcctataactggtataaaatcaggtataagatcaataggtgataacgcatatataattgtaatcattgcaaaaacttttgcaattactggtgtttccttcttttttaatgatatgtatactgccggtatatctaatttcaattttcttgctctgtcttttatcaccacatttaaatctcctttaataagagtattttaccgcaaatcactgtaatacaattctttttaactttatattatgtattctgtaatatccttaaatttattcaaaactaaaaatcacttagataaatattaagcctactttatttctaatttcaaaataaaatagactcaatattgtttattcaaacagagactttactcttggatcatctttaacaaaatcaatattctttctttttcttaataccctttttactaaatcttcatatttatctttggtccaattattagtcacatcaaatttcatatgactatataattttgatttaatagaataatccattgtacctgcttcatttaccatatttataattgcttctatggttctttccgaatcttgcctttctattgagtgccataagtctaattcacgcttatggtatggtccaaaatcaaatacttctatagccattttagcacgttctacatattcttctgcttcactaaatctttgttctttatatagaagttttattataaatgataatgcagttaatgtgtcatgcccatttttccataatttattttcccaaatcacataagcctcatctattttatccatactttcaaataatattgcttgttgaatttttttatctacatctacttctggaattttatctaatacttcctgagctttttcatactgttttttctccctataaatcgctgctaaatccaattttgccatagaagctgtcttttccttattgccagctgctacaatttcaagccaagcaataatttttctttcatatttttctttttcttcaatttgaggtcctaacaaatatattcttagcacttctgatatcattaatattaactcatcacaacctggatattgtttgattaaatcattgcctttctcaaaagcttttttaattccctcttttgaagcagtttcacctacctcttttgtaagtttttttacttctgtatctgttaattcctcattaaatgccaataaagtgttaacatctatttttaagacacgtgcaagaggtggcagcaatgttatatctggatatgaaactccattttcccacttatttactgccggagtacttacatttaaataatcagcaacctgctcttgagtaagattttccctttttctataatgcctaataacttcacttataatcataaaattaactcctctatttattatgtccttgttgatcaactaaaacattattgagttcctcattgaatatttgaaatatttcaatttcggctgtatccacataaatttgattctcacgcggaactttataattaaatgatatcaaagctacataatttgagcaattgaaggcttttcatcttttattcataaaaattaaccaatagttaatttttataatatcaccattttaactttcaatatgagatgtcattcttatttttttaatttatctgaacttcatacttatttcatagagttccacaatgatattcaaacttatgaaattccaacattgccattattcaggaaattcaaacaatggatatgtattgttatcaatatggaaccctataatataatttggatcatagtcttctatttccttttattaaacttctcatataaaattattaaatactcaaaaataattttacttaagtaatggtgttatattgcctgagtagtatacgcgtaaaacatgaagtgctctggtacaagcagtataaagcaaaagtctttcctcttcacaactataattttcatctcctgcatcatatataatcactacatcaaattctaatcctttagcaagataagcaggtattaccaatattccactcacatactcatcgtcatccttcattatcactctaacattagtcttatcttttaagaaattatatacctcatttgcttccttggcagtttttgttatgattccaatggatttataatttttctcattatatatttttatatctccaagaagtctttcttttatagctttttcatttgaaaaaccaagaagcaaaggttcttctccacttctttccacacattgaccctcaagccccttatcaaggagccttcttgaaaatttagtaatttccattgttgatctgtaactttttgttaaatttattatgcaggtattatcttcagcaaatatatgagatatattcttatactctcctacattcataaatggatttattgattgattcaaatccccaagtatagtcatgtttgcatggttaaaaagctgataaaatatttcatattgaagtggtgaataatcctgtgcctcgtcaataataacgtatttgatttctgaggttttaggaagatctcccattgcaccttttagatatagaagggctatctgatcctcataattaagcctgtgtacttttattttttctaaggtatatcttcttatttcactaattttcttctcgttgaactcaatatttgaatctttcaagaaaaactcaagattctcaaataactttttataaatgcccattaaatcaaattttgtcattctatttatttcatgataaatctctttcagttcattctttaccatagctgtactatgttctataatttcagctttatctaaataagaacctgagctcttaagttcatcagcaacttcttctatacgctgttcttcataaggctttaaaagaaataaaatcctctctcttatcttttgaagtcttctttttcgtggaagctttatataatctttgaaaaataattcttctaagtcctgagatgaaattattaaatcgcctctaaatttgatattcttaaagtttgtatcttccttttccataaaagttacataattctttaatatatctatgaactcctttgaagatttaaactttatattattaattctgatttgatagtcagcttccttctttgatgctaaaatgtattccatcatttcactataattttctttactaagtccaccacctagggctttgtgcatatattccttaaatgtagtctgacacatattatcttctccaagttcaggtaatacatcagaaatgtactcattaaaaatatcatttggcgaaaatatcactatattcttaggagttattttatccctatgcttatataaaaggtaagcaattctatgaagagcaacagaggtttttccgctcccagctggtccttgaacaatcagatttttatattcttcattacgaattactttattctgctctctttgtatggttgttacaatgcccttcatcttggtgtcggtacttttactcaagatatcctgtaatacttcatcatctatcttaagattactgtcaaacatatattcaatttcaccattattaattttatattgtcttttaagtgtaagttccccctctactatcccctcaggacatttaaactctgcctgtccaatttcataatcataaaacatgcttgaaattggcgctctccagtcatatattagaaaatcaaagttatcattaataagattagatattcctatatagcatttttccgctctttcctcccctttttcaataaaatccattcttgcaaaatatggagataaaagtactctttcgtatttttgctcaagctttcttgtaaattcatgagttctcttctgtattttcatggtattaatagactgcataaagtctacaatctgttctaatccattatttacagaaactgatcctacattctcccataactccctttgtacttcaatcgcatcacttttaaatttttctctaaagttacgtttttcatcaagttgtttttgagcttctttaagtacctcctgcagccattcacgttcaagtttccattcaaagtcgttatttttcataatatttcgctccttatgataaaataattttacaaaactaattccaaactctattgacattgctttttcgaaagtgtataatataattagagatatataaacaatattattaaaaagcgatatctaacttattgtatcgtttttattttgttgtgtcaatagtaaagacatttgtcattagacaaatgtcttttgttttttctttatgaatttatatttgagtgaattctgcagactggttactccttgagcgtataacctttaaaagtatcggaaatacttagtctttacggcactatgattttctccattaaagtggcaatttcatgataatggctgtgccttctccatatacactttgtgctagcaaatgtcccttatgtttaactacaacaatatcataacaaatgctcaaacctaagccagttccttcgccaggttcttttgtcgtgaagaaaggatcaaatattttatttatattttcttcttcaatgccagtaccatcatctcttatttctaaacaaaaatattctgattccttataagtcttgatttttatgctgccttttctatcttttatgccaatgtaataaattgaattttttataatattgaagataacctgttcaatttgaaacctattacacttaatatagtcatcatcgattaagtttacctctaagtcaaataaatcattaagtttgtattctttaagttccatcttcaaaattttcatagattcttctattaattcactgaacttattcatttcaaaattatcgtaagcatcttcattagaaaatctaatgatattttttattatactgcttattttttcaagaccttcatttgtctccgttataactggttcaaagtctgataggataaattctaatttacctctggaatctgataactcttcgagttcttttttatcagaaaaatattcttcattttccttaataaaagttaaatatttatctaaataatcttttagagttttagcataactttgaattgtatatatatttgaagtaacatatcctaaaggcgtattgatctcatgagcaattcctgctgaaaacctccctatagtagatagtttttctttatttaccaattcaatttgtgttgttttaagctttgcatttgactccttaagttgagcattagtatttttcaaattattataggattccatcaatgcattttgatattccctcatctttattgctgattttaatctggatgcgaattctataggctcaattggtttattaatgtagtcattagctccaaattcaaaactcttttccaagtattttttatctgttagcgatgtaaacatcaaaataatcacattcttattatttcttcttataatctctaaggtttctattccagataacttaggcataactatgtctaatagtataatatctatattctgagtatttacaatttcaatggcttcctctcctgatgctgctgttataatatcacatttgatttcacttattttaattacttcttttgccgtcattatgttaaactttgtatcatcaacaattaaaatattcataattcccaacccctaatctgcaatttttagacctgtattgatgtttattaagaacttgtcaggaactatagtaatcttgcctccaaatattttgcttaagccatctaggaaatttaatataagcttagcttctggcttactaatagtctttataaaattatttttgtttctaatgaaaagattaatatttaaagttgagttatgcatgaaatttaataatagttcttcttcttttgaatcccaagtaataacctctaaaacattattaaatattaactcaaacactcgcttgttacctaaataattaatttgagctgtattattatcataaattataggtaattttctactttttaactcatcaaatctaggctgcaatgaagttaaattaacgtgagttcgaaaagctagaatattttatgggtaaatatggttatgaaaaaaagcaaaaaagtatccttgtaatcttgtggttcgatattccaattattccatagttagatatttgtccaacttaagagaaggtttcttaggaagaaaactatacgaaatcaatcctgaaactatattaaccgcaaaattagtaaaacttctatgtcgattatgctctatctgacatatattttttagttggtcatttattgtttcaatgatagctcttttcctaagaagaattttatcctccattaacattaatttatttttcatgtttttctttatctttgttataagctgaatacctttggaatacaaaatatcggagatctttttagataaataacctttgtcaccaaaaagttttccaaataaatcttttgctaatatttctatagtcttaatttctctatcatctacatttcccggagttagataaaaagagagaatatcccctttatcgttaacaacaagatgaagcttaaaaccataaaaccagcccgttgaacttttaccacgttctgcaattcctttaaaaaccttatgagagtgtattcttctattatggcatacattcaaagttgtagaatcgataaaagaaattcctgtgcacttgccagttctaaatttcatcatgtataatagtagtgcaactaatgattgttgcattaattcaacaaacctattgtagctcacaagcttaggaaaatacggtttgagaacagtagacacatgctcaatataatatgatttaaaagttctgtaatttgacaaatgaaagtagatagttattgtcataacttcgcttaatgataaagttttacttttaatcattgcaaatttgcggtcgctattttccgttaggaaatgacttttacagtaattttcaaatccaatacaaaaattgtctacatcataaaatatttctactaataagttttgcataaaatcccatcctttgttttatttatttggtcgcacttatataataaaacattttgatgggattttttatcccttaaatttttccatcgaactcacgttaaattaaaagtttcagaaatgcttggaacagtctctaaatattgaaaatatactttatctattaattcactaatgtgtttttgcttagagcattcattatttaagctatcatacatactattttttaagtcaaatattatttttgaaaccactttaatataattaatatccttttgactattttttactaaattattgttgctatcaagtatcttcttatataacttatttttttcttctatttgaactttaaatatctcattttcttttactaagttataatattttaaagcttcacgaatagctggaagaaattcttcttcattattccatggctttgtaatatatttaaaaacccctactttatttactgtagctattacttgcgatatttgagcatatcctgaaagtactattctaacagtgttaggagatatttctttaactttctctaaaagttctaagccattcattttaggcattctcatatctgtaactattacagcaatttcattttcttcaaattgttccaaggccttttctccactccctgcaaaaagcgacttaaaatcttcttgaatagttattctatttattgaatttaatatattagtttcatcatccacaaaaagtacattaaatctatccatgctaattcttcctttctactaagttttttactatctgctcacatctttcttcagatattccgtaattgtcaaaaacctctaaataaagctttggtttataatttggatttattatatgccaagaataataatctgcaatgtaaatcattgatacgagctctctatttgcatcgctgcttaacataggattatgatgatataatgcactttctactattgcataaggtatatcccaccattgtagtagatatccgcctaattcttcatggtctattttgaatttttctttctctaaagtacttatctcacctaaggatttgtcagctgctaatttataaatatcatcatactccttatcatatattttaaagaaagctacttttcctatatcatgaagaagacctgcagtaccgtaataatcagggatctttttgcctaaagctttgttatatagttctattagtattttattagttaagtttgaatgttcccatatttcatttttattataaaaatcatttcctgatttaaaaacttctgccgttgccataattgcctttaaatttaccagtccaaggcttaatactgctgtctttattgaagctgtctttataccataaaaagctgaatttataattcttaggacttcagaacttaaagttatatctgcctcaattaatcttactattctatctatattgtgatcatcatgttcaacaacatcgcttatttcttgtagtacagaaggaattgtcggaagcttgcccatttcttttatatggtttaaggatatattattatgtaataattcttcagttttaaaaacctcatcaatagctcttctaaaatcatcctttttccaaggcttagttataaatagctttgctaaattattataaatagatttaaatacagttttttcatctgtaaagccacttaatattaatcttgttacctctgggtataataatttaactctttttaataattcatacccatccatttcgggcattctcatatcacttactattagatcaatatgggttttttcaagaatatctaaagcttcttttccaccgtttgcaatatatacgtcataaggactgtcaaaaaattctcttctgattgaatttaaaatagctttttcatcatctacaaataaaatagacttactcattttgggtcacctcttcctgttcttcatgtctaataggaagttttatagtaatctttgtaccttctcctaaaacactgtcaacaatcaaatctcccttatgagtattttttataatatcataggcaatactcaaaccaagtcctgtacctttacctataggttttgttgtaaaaaatggttcaaatattttatctaaattttccttaggtatacctgtaccattatcttctataacacaacttacaaataaatcatcactaaaagtataaatttttagtaatccaaagtagtctagatccgcattctcttgtttctcctttatagcgtgggaagagttaataataagatttaatataacttggtttatttcactagggattgcttccacttgtggtatttcatctagctcaatttcaatattagagttatatttaatttcatttttagctataactagagtatttgttattccatagtttaaatcatattgttcaaaattcttttctaaagatgaatgagcaaaattcctcattgcagctattatcttctgaactctttcaattccaccttcagtatcctttaataactcatcaatgtcatccattataaaatctaaattatattttctttctaaactctcaacatttgccacttcgtccttgaccaagcacattccttcttctgaattagccagtaaacttttatatagcaatattatctcattaagcttttcaacatacttttttaaagttccaaaattacttatgataaagcctaaaggattgttaatttcatgagctattccagcagatagatgacctaagtttgccaatttatcttcttcaatcatcataaattgagcattttctaaattcttaatactcttttgcaattcttcatctttaagcttcaattgacttaggaggttcttcttttcttcaatattttcagaaataataagatatttcttaacatttgaattttcctcaaaaatttgacatatcgatacttttagacaaaatacagaattttctttatttttagcataaatttcaccattccaattttcaaatagaaataaatcgcttatttgacttatcttattatcttctgtataactactttcaaaataaaataaatcgttaatattcatatttttaagctcttcctcagaataattccacattttttctgttgatgcattaaagaattctaactttccattagaatcggtaattagtaaggactgcttgatatttttgattatagtctcaaataaatatttcatttccataaaaactcaaccccatttttaaatattcttttatattactataatttctacattaaataccaaaatccttcaactttacatttatttataacttattacacaacaaattatattctgtctttaaaaatctctatattttttctacttattgttaaattaaaacaaactaaacttaagaacttatataaaatcaataaagctgaggctttctaaatacaagaaagcctcagctcaactaattttctattacactttttgtgtacacatcatcaggtatcatatgcattttttaatttcaagaaataatcatttaaaattttaccacttaaatttattagtaagcagttgtttaactttgtatttatattaatatcttagaagtacgcaaaaatatgttgtatttaaacgctcccaagtatataactccaatttagagctttccagcgaaaattttccctgcaattcctaatgcgctgcatgctttagggaaacctacatatgctgcacattgcaaaacaatttctaagatctcttcttgttttaatccagctttaagagcaccttttatatggaaatctaattgttcaaatgcaccttgtgttataagtgcagttatagttacaatttctcgtgtttttaaatccaaatttggtcttgcatatatttgaccaaatccaaaagaaatcattttatccaaaaagtctggaaatatctctcccatagagtttatcatttgttctccattttcatctgtcatttgttttaacatattgattccgttttcataatctttattcattttactatccccttttcatagttggtggtatttcatttggatcaactataacttctattagaattgcttccttatgtaaatttgaaatttctaatgcttcttttaattcaagttcattgcagcatctatatgattttacaccaagtgattcactaaattttttagcatccaatggtacattataattggtccctactgtctttccaaaaaactttatcatagctttttctggcatatctaaccttccattatttattactataaatgtaactggaatattataatttgctgctgttgaaatttcagctccctgcataaaagtgcatccatcacctgttatgcaaataattctagaattatagtttgctagttgtgctccaattgagtaacctatagcatgtcccatagctccaaatacgtcatcgaaaaagaatgtgcctggttttctaatattaaaatatcttattgcataaaaggaatgacttccatcatcgccaaaaacgacagcatcatctggtaatacttttcttattatttccatagcatgagcagatgaaatatatttactattttctttcatattatttttaaattcatagttttcttctaataaagtatattcatttcttctcatatctttgactttatctaatactaactgtagatttgctttgatatcaccaataataggtagtgttttaactggtaatgctttttctatgaatgtattatcataatctaaatgaactacttctttaggataattgtccggtgatattcctactaaagacatatcagatagtttacttcctatgactatcattaagtctatatcttccttaatatatttacttgatttatctgcaccgcctaaacctaatgctccaagtgataaaggatggttctcagaaaatgttccttttcctcctggagttgtcataactggtatgtcccaaatttcagctatgtttttaacttcttcgtaagctagacttgaatgtactcctttacctgccaatataacaggttttctagcattatttagcttatcaacaaattcatctaatcttgaggatattagtttatccatattgttaggtaactcaagttcaaattcatctatttcttcatcaagtatgtcaagaggtattgataaatgaactggccctttgactcctgaataagctttttctaatgcatgttttaataatatttgaaactgatcagccctttcgactctagcactaaatttagtaactgactcaaacatcctaactaaatctgtaccaaaaattgttgaatcttgtcctatagcttttcctagattatgcatagattgttgccccgtaataaatagtactggtacatggtaagctttagcctgtcctgcagccgttagagcatttgtgccaccaggacctgaagttacaagagctactcctaacttcctgttcatcaatgaataacctgctgctgaataaccagcgccactttcatgtttgcttaaaataaaattaatatcttgtctatctaattccataatcaaagatgcaagaggtcttcctggtactccaaaaacattattaatcccccattttctaaaattggatactaaaatagatgctatgtttctcatatgtatctctccttttataattaatattaatattctaaaaagtagttttagaatattaatcatattatctgatgtccagccacaattgcacccacgtgctatataaaacttctcttactatatttaaatgaatcacgtttaaatgattataactccttaggtggttagctaagaataaacagttaaatcatagatttcaaatttcacttatgtgtttcctgaatcaagtttttccttattccaaactaattgctgcacaaaatcccatacgcacagctgtaccaacattcccaactttttcacaatcgcctatagtcctagtttttgtataatatttttcttttatttcctctgctagtttattgttctttaccataccaaaagcattaatcacactatcagcttttataaattcagatatgccatcatgtgtttctatataaacgcccttactatcaattgatgtaactttactatttgtatgaattttcactccagatttataaagcataggtattaatgatgctgtattaacaaacaaagcatcttttgcaactgcatctgacatttcaataatcgtaactttcttaccatattcagtagcgagttctaaagcactatcacagcctgataagccgccaccacatataacaatattttcaccttttaataatcctttatttttatgtgccccaattagattaataacatttgaaccgtcgataccaggaatttgaggattagctggaactgcacctgttcctacaataattttatcgcactttgctaatatctcatcagctgcagaaacttctgtgtctaattgaatttttacattcaaacttttaagctgaacagcataccaatctattaatctgcgcaactgactcttaaaagcaggtgttgaaactgctgcaatctgtcccccaattaatttttctttttcaaagagagtaaccttatgtccctcaattgcagcaacacgtgctgcctctaaccctgatggtcccgctcctataactacgacattttgctgagctttagtatgtttaattataaaacgattttcattacaagcttgcggatttacagaacagcttaacttagcaaatctacctacaatacgtcctatacatccctcattacatctaatgcatggtcttatatcttcacgattaccacacataagcttatttggcatttctggatctgctattagaggacgtccaaacatgacaaaatcagcatttccagattctgttaacttaactgctgtttcaggcgtatgatttcccgaattaagtattggaatattaacagctttgcgtgtaggctcacataaatattccatacatgcatcgcctaaatatgaaggcggaaaaacatattcaattgcttcagacgatcctgcatctatatctattgcatcaactccagccgcttctagtagtttaataagatgcaagctgtcttctatagtacgcccaccttcaaagcgatgatcaagtgatatacggaataatattggcatatctggtccaaccgcatttcttactgaacgaacaatttccataggaaagcgagcgcgtttttcatctgttccaccatactcatcctcacgtttgttccatattggagacataaattgatctattaaatctccagcatgtccatgtatctcaatcgcatcaaaacctgcatttttaacaaatttcccagaacatgcaaattttttaataatttcttttatatcttcatgactcataggtctacaatttacttttttattatatgctgctggtataggtgatgctgacatcggcggctctccatattcgtttggaagtgcatcacgtcctgtaccacaacataattgggcagctatttttgtcccatatttttgcacagtttcacaaagagtagtaagttttggtattacatacgtatgctctaatatacctgaaagagggccttgtgctatatcatgtgagataaactgagcgcccataattataagtccaactccgcctcttgcacgttcttcataataatcaatttcatcatttgaaatagtaccatcactattggatgcattaattcctataggtgaaaaaactattctgttcttaacctccatgcttctaattttaaatggtgtaaataacttcttatagttcataataactatttcattcccttctctatacctatcaaaatctatatagatacattaaataaataactcactaattaaatagcttagtttataaaattttttcatatattacttttataaatattcctttaaaagtaaatatcagaaaattcaacattaatggcatttactaatccattatctgaagatataaatgctctatttttctcctcaaatgtaacttctttaataggtagcgttattgtaaatttactgccaattcctaattcactttctacctctatgcttccttctaatatttctaccagcatctttactaaggctaaaccaatcccactaccttctgcctgtcttgaaagattattatcaacttgtccaaatcgctcaaaaattatttcccgcttatcttctggaatccctaccccagtatcaatcacagcaattgagactgttttattattcatattttctgtaatctcaacagttatatttccaccttctggtgtgaattttatagcatttgataaaagattcaaaattatgcgttcatatttttcatcatctattgaagtatttatgctatatgtattagttttaaattcaaacgcgattttcttttgctccgcatatatttttatagattctgcaatcaattgtgttataaatacaacatctatatttcttgggtttactttaaattgatctgcttttaacttagtaatatccaataaattatttacaagcctcaactgcctgaaagcatttcgctttatgcttcccattaagtttttgactgattgaggaatctgattaatatacacctgttcaatcaattgaatagctgaataaattacatttattggtgttttgaattcatgagtaataagggttataaattcatccttcatcacaaggtctttttctaaaagctccctttgcttcttttctgattcatataatagttctttttgcttattaatcttacgattttgttttctaagcaatagttctcgttctatggcatcaactacagtagttaatgtcattaagaaaaatggattatgaagtataacagcagtcattatacatatagttccaagtaaattatcatcatctgaatagtgaaatggtactccataacaagcactattctgtaaacaattataataatgattatctcctattatttgtatgggatgattttgtttaagggtcaagctaaccacatttgtccccatatcttcttcacgaaactgaatacctggcctaactccaaaatcaaacattgtttctcctatagcttcgtccccaagaatttctaacaaatacccattctcatcagtaatagtaactaatataggagtaccttctaaagatttaatcattttattgccaaaaaacttaacaacatctaaaacttctttatatatatctttctttttagataattctaattctgatatagcattaggagacactctaggtttgttgggatctaatcctaattttctacacttcttttttgattctataatataatctgcttcttgctcatatatatcttgcaacgtatattgcctcctcaaaagaaaactttagtaatttatgtattttgattcacttttttacataatttacccaatcattatatcactaagtttctattatcggaatatttattctaattaatttcataatttacaattaattcatatatattttatatttcgcattcataaagtcgcagaaaaatgtaaaagcgtaaccaatgctgctcaaactaattcaaatttgtaaaattaattttccaacaatctttattatcctcatatttcataacacttgtcttttagaaaattttttaatgcatcttaaccctatatctaataaaaattgttacattgttaacttcttttgtttttaaattcttaacttttttcctttttaaattgtaaaaaagttttattttaaaaaattttcgttcaaaagaatatttatttgtgacttgcttttaaacgctttgatttatcatataaaaaatattactattatttaacttaatccctcaatcataaacaaaataagtgtaaatgctaatcaatttcttaattaacgcttgaatatattgatttagtactcaagtaaaatgaatattatgtaaattaattgattgttttccattatagggatataattaattgtacggtaaaaggacaaacttagtcgaattaaatatcatgatctaagttttatataacaaaagaactagaaagaaagctaatgccatactattgttggctatgttcaaataaccaaatgtaataaattaaattaagtcacttactcgacttaactaagttgtagtaaccaaatatagtaaaggaagttaagtcgcttaagcaacttatcacttattaagtatttagttagggggaaaattatcaatgataaacaaaaaaattagtaaattattaggaccagtttttggaattatgggattcatgctaaccatgggtgcattagaaatgccagctttagcagctgataatgtacaagcaacttcttcttacacaagtagtacaacttcagctgctgctacttataaggactattcagttgatataaataagagcgttactcaaaatggattaaaagtaacgttagaaaaggcaacggtaacaaagcataaattaaatgcagtaattaaagtagaaagcacacaaccttttgataaaactaaaaatgataattcgataattcaattactttatggtgaaactcaacgaggcagcgaaagcatgtcaactgattttatagatgataaaactctattaattactatagatcaagatactcatgatgaagaatttcctaaatgtggtgatttaaggctagatgtagtatttccaaattataaagttaatataggaatggatgcaaacgcagatttttcaggattatttaataacataatcgaaaaagatttatcaacaaaaatttctgggtctgacaggaccttagataaattagaatctgatgttttaggaacaacaattacttatagtgaacctcaaaaagaccatgatgataggtatatggattcttcaatgatcttaaaggttggagataacatgtataagttaagatcatctggaagttcttcagatgataaagtaataaaaggaagatatgaatcaaagacagctacttatgatattcttaaagaccaaaaagatataagcctaatacctttaacttgtaatataacttgggacgaattcagaaaaacacatgaaaatagtaataaaaaagaagatactaataaagaaacaactaataatgtaacctattcaaaatcttttgatttctctgatggaagtaaaggagaaatatataatattgaaagaaatgataataccgtaaaagtatattgtaagggaagttcagaaaaggcaagtttattaatggcaagtagcatgagtatgtattatcattttacagaaggtcaagtttattactctaattatgatagcgataaaaatatgagtttctataaagatccaaatgttgctcttggatatatcgtagagtttaataatgtagaaaaagataaagcatttgatatattttctagagataatatagaacaaatagacagatataacctaggaagtgaaatacaaatttctaaataaaataatgaaataaagcagtagctaatcaggctactgctctattctccgtttcactattctctttaacattgaaacagagaatccaattgcatatcataaaaaactgctttatgtatatgaattattctgcatgcttatacaaaatcacactttcaatataatttatataccttcttaattcatttgattcttctctagtaatttctcctgattcatacatattacgaactgctgaacgctctatatccatagctttaattcttagttcttccttttgttttatgctttcctcattatatttaactacgtttcctttgaatctattaatcatggttctataatatagaattacatcttgtgcagcgtttgatccttcatgacttcttagatattcctctaaggcttccattgcagcttgaaaggatttcaattgaatatcttttactaatttcaaattatttagcttgatttcttttctctttttgaactttttgtaaaaaattctcattgctctcattaattttcttacaagaaacatagtatcttgactaggatttcttagaaagacttcctctctataatctaaagatttatcaagtgctttaaatatttcttcatcaatctcacttttacccattaattcattaatatattttcgttctgcctttaatgctattaattgtatttcagccatttcttgttgattaaaatttctctcgactgcgtttgaagtttgctcaaatctaagattttgagatatatgtttatattcatgaattaattcataagctactgattcattttcatcatctatttctgattcaatagctttaataccagcaagtaaaagtttatttttggcttccattaggtttttagcaccaatcctttggtcttcttctaattcacttttacataaaaatggtagaaatattgttgcacatattaatgtgaataatattacaccagcagttaaaaaaagtatcagtgaacgttctggaaatgcatctccattatccaagaaaaaaggtattgatagaactcctgccattgtaactgtacctctaacacctgttaaactagttaataacgctatctttacattaggcacctctatatttttagttttgcttaaacgatattcataaaaagctgaaatataagaccaaataaaacgaattgccaaaataacaaatccaattgcaataatatacccaatagcttttaaatttcctatattgggatcagctattgtttcactcattgataaaggaatatttaatcccaataataaaaatacaattccatttaacacaaataaaataatcgaccatatattttctgtaagtacctgttcttcagctatgctagtttcaaatcttctgctgataagtgaatgaacaatccccgcaaccaccacagcaattactcctgatgcgtgtaaaagttcttcagtaattataaatataacaaatggagctaatatctgcagaatggagtgaaagacaacatcatttattccctctttacgcaaattaaatcttattaatgtcaaaatcaaggcaaaaatcaaacctaagagtgcccccactaaaaataaatacgaaaagtttaaaattgcatcttttaatgagaaatagcttgttactacagcagctatagcataattaaaggctactatacctgatgcatcatttatcaaagactctcctttaacaagatttagcactttttcaggtatatgaattctctttgctataccatttacagccactggatcagttggtgataaaatagctgctaatgcaaaagcagctgcaagaggaattcctggtatcatccaatgaatgaaatatcctccacctatagttgttaataaaactaatattaaagaatttccaaatattgaacgcctcattttccataactcttctcttggaaagtattttccatcattatataaaatcggtgctacgaataagagaaaaaaccattcttcttctaattcaaaagaagtatgtttaaatgcaaatgcaataattacacccaaaacaatttgtgtcaaagctgtaggtatagatggaacatagtgactaataatatttgaaatcaataaacatcccatcaacaataatatcgtcattagtaaatccacttcatatcccctcctctggtctattttaacttatatgttattactattatacatgataaaattactcaacaataacattttttataaattagtattttgaggatgtaatactacttctagtctgccctataaatgtaaaaaaacttattagctttttagaagctaataagttctattttctcgaagaaatataataaaactgctagagtgcttttactgattttaacacttattctttgctaagtaataaagagtccttacaccaactcctgtaccacctttagagcaataactagtttccttttcagtccatgctgttcctgcaatatctaaatgtaaccaaggcttattttgtacaaattcgcctataaataatccagcagtaatagtacctgcatgcctgcctccagtattttttaaatctgctatatcggacttaataagttttttataatcatcaaagttaggtaatctccaaactttttcatcagctttaagtgatgcactttctaactctttataaaactcatcgttattagatactacagctgttgtagtaactccaagtgcaactaaggcagctcctgttaatgtagctaaatctataaccttattaactttttccttttcaattatataatgtactgcatctataagagtaagtcttccttctgcatctgtatttaaaacttcaatatatttaccagccatagaaccaattatatctcctggtttatatgctttgccagatattaaattctcgcatgcagcaattactcccacaacatttatctttaactttttctttgctatagcacttattgctccaataactgatgcagctccacccatgtctgatttcattgaatccatgctgctagttggcttgatagaatatccacctgaatcataagtgactccctttccaactaaacctaatatgtcgtcctttttgctttcatctccaaaatatctcattacaataagcctaggaggaagttctgatcctttagccactgataggaaagattccattccaagttcattaattttcttttcatcgaatactttaacttcaaatccatatttgtttccagaaccaataaccttttctgcaagagtttctggatataatacattagctggttcattaactaaatctcttgcaaatttagttgtttcaacaagtatcaaagcttcatctatatatttatctattgagtttgactttccattttcatcagtgcagatacttacctcaatttccgaattttcattagcttcagtcttgtatttgtcaaatctatattctccaaaaccaattccttcaaccatagactttgtaatatcttcaactgataacttctcattagatatcatatttaatgttatttttttagcttttaattcaattgccttttttattgcctttccaaaagaacctcttataatttctgttgtcaactcatccttgcttccaagtccaataaatattatgtcttgaactccactttcaactacattggtagccacacatatttccccagcattacctttaaatttattgctttctctaaaatgcttatatatcactgtaagcttttcatcttgcaaatctttattttcactataaacaggaagcataactaagtcagcctcatgagctttaaatgtattaattttaaatttcatataatttcctcccctgtataaaaagtttattattctccatacttttatacccactatttactagccacaacatatactaaaactattccaatatttatagtatatattattttcttatactctttctcttaattaaaattataaacaatacctatgtattttgtttaaacttacaactctaactattatatttatataatataatagttattataccatatttaagaaactaaatacttctttcttatggtataaaaatatataatagataatcattccaattgaaatatcacttaacttttattaattattaagttgttgagtaaaataaataagccatttctttgtcatatgataattttactaaaaatccaatcacattacataaggaatgacttaaatatcattatatcacgaaagattaaaaccaaaaatgataattataagatttttgaaaatattaaaattgtatttgctaaattaaattctaatattaaaaatgctaaagggcaaccacgcaagtcctcagatgagcgatagttacctgcatgctatatgatgtttaacataatatattcagtctgagagaacttaaatatgaaataaaaaaaagattatgtgtttcaatctataattaatcctaatgaaatacctgattattctacaatttcattaggagcaatgctttgtttttttgaatctcccatcggatgtgaacctatataaaaatagattgaaaatagagcaattattctcagtattaaaattcaacaatataagtctaatttaacttttttctgttttcataaataaacctcttacagttcattaattgtatcagttatcgccatattcctaatccgtttcgacggagcatatattgcaacgatagccgtaatcgaaacaaccaaaagtataataattatatgcataataggaatactccaagtagcgtagttaaaatgagcagtaataagaatgttatatagtaacttgttaatgaacagaccaattacaattccgacaatacaacctgatatagaataggtaaaagcttcagcagctatcattttggtaacttgatgtccgtccataccgattgcgcgcatggctccatattgctttatttttgcagatacactcatggaaatgctgttcataatatttaacacagtaactaaggtaataactgccaaaaatccatatgcaaaaaacataaatgccatatatgtgttggattgcatgttccgtaggtcgcgttggtcactaaacttatacttttcgcctacggctttattgataacttcaacatttctgtccgttgaatcctttgtcatttgtattataataagtgaatagtcggttacgccggtaaggcgagtaaaagttttcccagaagtaatgagtgttattttcccatttggagcaccgttatcactaaatgggttacatttcaacagccccgtgatttctacttccttatttcctacttgtattttatcgcctattgctaaaggattgtccttgtcccagattgtaagtacataattactatccccatacacttttgagatatcgctgccttttctaagcatattatcttttgtaagacagtccaaatcataatcatcgtaggaaatcatatcaatcatgtttgtttgaaaatttacttctgctgggatatcaagacagctccttcgtccaaaaacatgttttacacctgacatactacttattttatcaagcagttcactatctatggaatttgaactgttattactagaaatgttgatgtcagaagtatccgacgattggggcataatatatccgataaactctattaaaactgaaaagctcaaaaacaggattatactaagagaaaacgagcttgtcataagtattaaatttttctttgccgatactgcatgatgaataccgagggcagtttcaatttttgaaaaacggttattcaacacatgggttgcattttttgtgttttctaaattgcctgatactgctgttacaggcgatacctttgcagctcgttttgcaggagagctggcagcaatgagtactgtaacaactcccacaattattccactgataatgcctggtggactgacttcccaaaggggcatatcggagaactctgtcgcgacaagaaaccgtagcacagcacataatacccatgtgactgcaatcccaagtatcacacctattgggaccgcagttttgcaccaattaagggcttcaagtttgataaaacggataatttgttgtctgctcattccaatgcagcgcatcattccgaaaaactttgtcctttgggcaacattactgtttatactacttgaaatcatcagcacccctgcaaccagtataagcacaaacagcacagaagctataggatataaactttgtgccattgcacttttactaagttcttgtacagattgactgacatgcttattaagtaatctttttgcttccattctaacccccatatctgccatactaaaaacagcagtcaccaaaaatacagcaaatataatacatagaagcgtcatacggttctgccgtctgtgtacttttgcagaaatcggaattagactaagatagcttttcattcgctgtacctccctaaatcggttagtatgccatcagacacttgtaatatccgatctgcagcctgtgcgatacttcggctatgggtaatcataacaatggtctgctggtactttcttgcagcttcttttagcaaagtaatcacttcactgctgttttgcgtatccagattacccgtcggctcatcggcaaggataagcgatggccgcgtaattagcgcacgtcctattgctacacgctgttgctgcccacctgataattgacttggtaaatggtcacggcgttctttcaaattaagcaccgtaagtaattcctcaagatactttttatcgggcttttgataatcaagtagtacgggaaatatgatgttttgctcaacattcaattctggaattagattaaaactctgaaaaataaatccaatatatctgcgccgaaagatcgttaagtcactatctttcatggaaaaaatatctttaccatcaataaatatcttgccggaagtgggcatatcaagcgcacctacaagattaagaagcgtgctcttaccggagccggattctccgactatcgcgacaaattctcctttcggaacagaaaagttgatatcttttaatgcatgtacggcagcttcaccgttgccatagattttagaaattgatttaacttccaataaattcatagattattcacctctttctatcttgatattgaaatattatcatatcaatcttactgttatatgacgcttaccctacaattttgtaggaattaaaaaattgattataaaagtagtgccaatacccaattcgctgtcaacctcgattgttccactgtgtgcttcaacaatagcttttgcaattggtaaaccaagtccgataccttgcatgtctttagaaaaacgactgcgataaaatcttttgaaaatatgatgtaaatcctccggatgaataccgcttccattgtcttttatgatgacttgaataatagacccaaattgtttccattcaatataaatagtattccctttttgcgtatggtcaaaagcatttttaacaatattactgattgcttcaattagccaagtacagtcacataataaagtaatatcatcatccccagatagatatatttccttttcctcctgtttggcacgaaatgaaaagtgcctttctatacttcccatcatttcagataaattttctttagctttctcaatcatgattgttccggcatcgagttttgtaattttcaagaggttttgcaccagtatttctattctgtcgagctcctgctctgaaagatcagtaaactctttgattgttggtaaactctttgcttcttcttgcataattccattatatatattaagggcagcaagaggagtttttaactggtgagaaatatcggaaatagtatctttcaaaaatttttttgcttttccctcattttcagcatgggcatttaaaatagaaattacggaatttacttcatgaaatagtatgtatagctctccttcatcattacattcaatacgtacatttttatttccagaaatatattctttgatttgtattaccgcattctccatgattatattttcttccttgaaatacctataacctatcactaatatcaatatactcatgcacaaggaacataccaatatatacaatgctgcatttttaaattttaaacatattaaggtagcagaaatcaaggtaaaggcaactataagaagcaataccaaacgaaaaagttctttgattttcctatttaccagtattttcatcttacgtcccaatcaacagcattccatttataccccatacgcctgacagtcactattttttgaggctcgcccgggttatcttcgattttcgtgcgcagtctacgtatatatacggtaatagtattcttatctatatagttttcgttgcaatcccatagtttgcttaaaatctgttcaggagacagaacaatatcgggattttccataaacaggcataacaatttatactcacttgttgttaagtcaagttgttctccatttttataaacttctgcttttagcagttgtacgtttatgccattagaatttaactcggtatcagcttgaataaaattctcacttctgcgaagcaaagcatttattctcgacataaacaccgccagtttgaacggctttgttatataatcgtcgccaccaatatcaaggcccattatcatatccgtttcttcatcagcagcagtaagaaacataatcggcacctttgatgttttacggatttttttgcataaatcatagccgcagccatcggggagcgacacatccaaaatcaccaaatcatatttcttatcttcccatagtgcttctgcttcaagaattgtacgagcaacatctatttcatatccttgctttttgattgcaaaagataaaccattaattaaactcaaattatcttcaacaaagaaaatgtgtttcaattgttttcaccatccttcattttctgcgtatatgttttagctgtatatggcttgtcctcatatttaaaacaagctatatacggctaaaacatattccataattttattatcctatcatttaaaaacaataccactataaattatatatagttacctgaacaattacaagaaactccaaatgttataatccagtaatatgtatagataaagctttctaatataattaatattcatgcttccaagtatcttctgcgtctattgctttgcaaacttccatattacaaatataatttttagctatatcttttaaatccaacttttcaatctcccatttttatcaaactagcaaatctttttattatccatataaaatctccttctctctagagctaatatgaaaatataatgccaaatagacttattatctaattgattgtgacttaataagcataagtgcattaacttctaagctttttctacggtattataccatataatacgaatatgaatacttttggttcttttcaaaccaattgaaaatcatattatataagttataacttcaaataaagtacaacagcatccgacttaactaaattataatttactataagataaagctatttttatcatacttttcgaaagctttaccttaataggtagttcctaaataatgaaaagcactgcactaaatatatcgatttaccacaatgcttatatataacaaatttaatttacaagttttagatttacaaattgtttcttattcttcttgctacatctggataattagttattattgagtcaaccttgtttttgtataagaagttcatttcatctccttcattaacagtccaaacatgaagtcgcatattttccttcttacattcttctattagattttcatactgaagattgtagctacaaggatgtaatgcagttacacctaattttttagcatattctaaaatacctatccatccatcacaatataataacccagttcttgctttattattaagttctttaattttctttattgtataatgattgaatgacgaatatattactctatcttccaaatccatatattttgataactttaatactttttcttcaattccttcataaaatacaattccagttttaagttctacatttatacttaaattagttggctttaaaagctcgtaaacttccttaagagtaggaatttcagcatactcataattttgattagaacaattaaagttaaaactcttaagttcctttaacgtatattctattacattaccctttccattacttgttctatcaattgtttcatcatgtattactactaattctccatcttttgtaagttgcacatctaattcaacaccatctgcccctttggcaactgcaagctcaaatgcttctaaagtgttttctggcgcatatcctgaagcgcctctatgtgcccatatctttgtatcacccatactctatcaccttccccataatttaataatacaaaagagtatcaagtatttaattactattgatactctttctagatatttgattctttctagatttaaactattttataaaactatagaattgttttgcaaatcaattatagatatccaatttaagaattcgacttattagatgaacagatttacaaaattgctagaattttaagctcatatctttactagaaatcataaatatatttgtaaccacaagggtcgtaatatgaataaaacatttgacaatgagctgttaaaggttcttagctataggttgttccaatttagcttgtcaaactgaaagttggagcatgctaaattggatacaacctgctgattagaaccttcagcgatattttcatagcttttcggaacaaaatatttatgatttcggtagttaccacataaatttagttttagagttcaatatctatatagataagccaattataagctggatttatactatgaaatatatcccaactagaaatgggtaatatacttttgtggaatgttttattggcaattttgatggaagtaattctttggctataagttgttccaaatgtgctagttcaaagcttgttctttgaagctagcactttgggtgcaactttatagccttagaattacccatcagaattgcctaaaaactggaacaaaagtatattattcatttcggtgaggtatacgcataagtatagattatagctgttttatctataataattgtcacatgaatcatactacttattaatcttgttatattccccaattgacttattaatactatctgccatagcttttacagtttcttcaggagtttgttttccattaagcatattttcaatttcagtttcaactgtttgcctagcttctgggaatacgcttaacagtgctcctgcatactctggtgatgagctgtgaagctgatcaactgctgtcttaaattgtgggaatttattaatattatctttatatacttgttcattttgagcatcagttgtaacagggaaatatccagtgttagcattccaataagcttgtgattctggagagattaagaattttacaaattcccatgtggccttctttttagcgtcatctttattatctaatgcccataaagaagcacctccaattgaaactccgccttttgaaccatcaacagctgttggaaaatatgcagtgccaacttcaaatttaccattaacatcagttaagatttgttttaatgaagctgttgagcctaatgtcattgcagatttccctgctgagaaatctgcaagtcccgcatctccaccacgtcctacattagctgtacatcccttatcatgtaaactcttccatgaatttaaaatacttaaagcagcaccatttttgtcgaagtcaactgcggttgctgcaccttgtctaccatttccgttatctgcatatttaagtccttgtttagcaataaattcttcaaagaaccagccataaataccaagagaaattgcattagcagctccacctttagagtttaaatcgcctgaaatgctttcaatttgagaaaaactttggggcacatctttaatgccagccttagcaaacatatctttattataatatagtattggtgttgatgaattaaatggcattgaatataatttcttatctacagtataatatgccgctatattaggttctatttttgaaatatcataattatccttatcaattaattcctgcatcggaactatatatcccgaatctatcataaagcgagttccaatgtcataaatttgtactaaatccgctcccatgtttccaagctgtgcacttttaagcttatttattgaatcatcgtattctccttgatattgtgcatctacatgaattcctttatcattttcactgttaaatttgtctactaaatgagtaagagcttctccattcactcctcccatagaatgccagaatgttattgttgtttttcctttattatcaccatttgatgagttactcccagtttctttactagctccaccgcaccctgcaagtaaagtcaaggccattgtagcagttaaaacaagtggtaagaattttttaagtttcatttttattttctcccttcaattttaaaaatcataatattcctatatttaaacagcttgtattttttaattaattgctgttttttgaccattagcgagctgtactttaataaatcttactctttgatttaacctttaacagcgccagagaacatacctcttataagttgtttttgccctgcaacaaaaattaatagtgatggtattattaccattacaacacctgcaatcatcattgttatggactgtgaatcaatactattgagcatacttataccaatttgaactgttcgcattttatcagatccagttacaagaagtggccacatgtacatattccaagcatttataaatgtataaactgccattgcacctattgatgattttgtaagaggcattaaaattttacatatgaactttatatttgagcatccatcaatctttgctgattcataaagtgcaattggaaaggacaaataaaattgtctaaataaaaatattcccattgctgatgccaaatatggaactataagtacttgatatgaatccagccaattccatgagcttactgttaagtaatttgaaatgatcgttgcctctcctggtatcatcattgttgacataacaatcataaacaataattccttacctttaaaatttaagaatgaaaatgaaaatgccgctagtgaacatgatactatttgtccaactgttattaatcctgctactaaaaatgagttaaatacaaatttaaataatggaactttttttaatacatctaaaaagtttgataatgtaggatttttaggtatcaaatttaaatctgatgaaaatacctcacttgattccataaatgcaatgcttaaggcatataaaagaggtagaagtacaattaagacaacaatcaaattaattagtaatctcaaagaagagttaattctttttctatttttatatcttcttctcatcttagtttgaatatcttctatttcctttttcgttatattttcattaattacagcttccattaatacttaactcccttcttttctactctgaacattattaatgtaagtatcattattattgcaaaaagtacaactgattgtgcggctgcactaccaaatctataattgaaaaatgcatccctataaattgaataaacaagaagatttgttgactcccctggtccaccttgagttaatattttaacttgtccaaatgcttgaaatgcttggataatatttactacgaacgtatagaatagaattggactaagtccaggtaaggttaatttaaaaaatttatgaagtgagcttgccccatcaattgatgctctttcatatatagattcatcaatattgcttaacccagccgaaaaatataggaaattaataccgctattaagccatgcagttaatactgcaacacaaattaatgcatacttaggatcagttaaccaatttatattaacattgagaattttatttacaatacctacagatgggtgaagaataattttaaatatcattgatgctgatgtagatgcaattgccattggaagagcatacgcagtgctaaaaattcgtattcccggaaaagttttgttacacaataaggctgttataagtcctaaagccatgcttactaaaacaactattgctacaaatataactgtaacaattaggctattataaaatgatgatgatgaaaataaatctgtatagttctcaactcctacaaataatttaggctgtcccattttatctgttttatataaacttaaatatattgttttaaaaaatggataaaataaaaataatataaaaattataaggcttggtataataaacaaatatggtccaatttcaattttttttattttattcattacataggccccctttaacttcatcactcaaaatattcttttctgtggtttcatcaaaaatacaaatattttttgtatttattaaaatctgagcctcatctcccttgcttaagctaacgctatctttaaaaattgctgttagctcactatttccaattttaaaataaacatatgtcttgtctccaagcatttcgcttaattccacttttatattaattactgaagatacatattgtttatcttcgtcctttatatctgcactttgcgtaatatgctctggtcttataccaataattacatttttattttcataggatttttttattaatagcttacttttacttttaggtaagtacactttttcattaccgaatataaaatacatttcatcattttcctgttttaattggcatttgataaaattcattgacggtgatcctataaaacctgcaacaaatttattgattggattattatataattcctctggagtatctatttgatgcactattccatcttttaatactactatttttgtaccaagtgtcattgcctccgtttgatcgtgcgttacatatataattgtattatttagttttttatgaagttttgacatttcaactctcatatgatttcgtaattttgcatctaaatttgataaaggctcatccataagcaaaattttagggtttctaattattgcacttgcaattgcaactctttgcttctgacctccagataattcttttggcattctctttaataattcttgtattcccaatatttctgcaactttatttactttgtcttttatagtagctttatcaatttttctcacctttaaagaaaatgctatattatcataaacggacatcattggatatagtgcgtaattttgaaacaccatgcttaaatctctttctttatgagtaagataatttgcaaactttccgtctagccacatttcaccttcgcttatttcttcaaggccagctatcattctaagtgttgttgatttaccacatcctgatggcccaactaaaatcaaaaaatctttatcatcaacttctaaattgacatttttaactgcatatgattcatcatcatattttttacatacgtttttgagcaataattttgacaccagttttcctccttaaacattacttttaacaattcttccaacaatttgaatgttatcattgtaaaaattcaaagtcaatttgcagcaaacgtttaacacaagtatttacatagtattaacctaagctttacagttatatgcctatacctttaccttaatttaacaaaaaagcactgcactaaatatatcgatttagcacaatgcttacatattaaaaatagttttattcaattatactgttgagctttaaagaatcaccttacttgcttttgtcatcattatagaacttctcatcgtcatttagctttttatctagataaattaaatattctcaaaacttcttctacagaattagatttattcatttcatccataaaatcatcttgttctattattttcattaattccttcaaagccttcatatggcttttattatctattactgacatagttattattacctttaccggatcattttcaaggtttccaaatttaattgggtattttaatgtcataatactaaagccaattttatacgctccatcttctggccttgcatgaggcattgctattcctggtaaaataactatatacgagcccaatttttcaacgttatttatcataacatcaatataagagtcatttatgcaactgtttcttttaagaatctgtccaccttttactattgcttctttccagttttctgcttcttcatttagtttaatgtatttatcattaattatttctcctaatgaaggctggattatttctttgtatgaacttaagcatgtcattatttctttttctaaatttgagtagttatttattatgcagttcttatcaactatatttagtatattttttatgacacttctttttgattccaaattcatattataatattcatcatcttcattaaaacatttagaaaaacttttttcactttcaaactctttcttattttcaatatcataaagttcttgtgaatattttgaaaagaataaacttaactcacttatatttttttctgtcaaaaatggacttactaaaatacatcttatacctattatattaattgggattgttgttataattaaatctataggttctctttttgctatcttttcaatatcgtggcttgaaactgtatctattatgtttatgtcaaatattgatttaagctttattgatacaaattttgatgtcccagctccagtagcgcataccactaaaactctaggctttatcttgtttaaattctttatcctctctaatgatgccataaagtgcaaagttatatagccaatttcttctttgcttatttctgcatttagatccttttctaaaaatatcaggctttcttctactaaaataaaaacttccttatatttatatataatttcatcaagaagaggattatttatactgactccatgttttaatctataaatcattggtcttatatgctgaattaatccttctaaaagatgctcatccgcttcaaaattatactttgtccttttctcaacttcacttatcaatgtagctgaaataagctgtatgtatattagatcatcatttttttcttcttttaacattacattacttccaagaagatgtattgtcatatacccaatttcacttttgggtatctttatatcatatctatcctccagcattcttgccattgcagaagctatagaaaattcacaagttttacttaaatttttaagctcattctcatccatcacgatatctttagctagttcaattctctttatggcaattgcaatatgaatcaataaattgttaaatgaataatcagataatgtactttctaattgatcttctgcagtctttattacattacctatgaattctatatccatatccttaaatagctttttaaaattaaaaataatcaaatctgagtcagctgcattttcaaacataagattcgaaacaacttttctaagatctttctcatctccaatagcttttattcctttggatttttcacttttaagctttatattattaccttcaagtaattttcttacttctttaaggtcattattaatagttcctctgctgacgaacatattttcagctaggctgtttattgttagatagctatttttttctaataacttatagattatataaattgttctttccttttgagacataacataatcatagctgtttatggattctattaagtttaaaagcctcttattttcatcttgccttaaatctattgatattccctcattaggttttctaactaatggttttaaatttatttcttttaaatactcatctattctatctaaatcatatcttatacttctagaacttattttaaacttaagagcaatatcctttatagttagaggcatactgctgtttgctatgagttttagtatatctgaacacctgctatttagcatattatacacctgcttttaataagatcactcgtttttttaggcatacgaaagaaaacaacaaacctaaatataccatgacttgctattcctttgattatgccttaaatatttaaatattcattaacttaagcaaatgagttgaaagcttaatttactttcaacccactaatattatttatattgaagagaaatgatattatgtcattaatataaattcctctaatttattagaaatatcaatctaaattattaattgcttttgatttagtttttatgaaattagtaacaattaaaactactagtaatataacaacaatagctataacaccaaattttcctactaattctgatgctttaccaagtataatacctaaaactccaaaatcaaaatcaccaaaagttgtgttttggaatcctaatgaaccaagtacaggtaaaagtaatgctggtgcaaaagtaatcaagagcccgtttacaaatgaacctactatggcacctttacgaccaccagttgcattaccaaatattccagcagttgctccacagaaaaaatgaggtactagtcctggaattatcaatactcctccggcaaatcctaaaagaatcataccaataacaccaccaatgaaagaagatacaaatcctataacaacagctgtaggtgcataagtaaagaatactgcacaatcaacagctggtacggcatcaggaataattctagttgcaataccttggaatgctggaataagatcaccaagaatcattctaacaccactgtaaacaattgttactccaactgcaaattttagtcctgccataagggcaaataatataggcgatgtaccatctgaaatagttgctacaaaagttggacctgcagctattgctgcaattaaataaaatatcatcattgttaatgcagtagaaatagttgtatctcttaaaaatccccatttctctggtatttcaattttttcagtactttcttcaggttttcctaccttagatcctacccatgctgaaatatagtacgctaaactaccaaagtgacctagtgcaatatcgtcaccatcagttacttttctagtaaatctttgtcctatcgcaggagatattgaactccatgctccaagtaagaatccaccgaataatattaattctgttccgctcatacctgttgttccaagaacagctgataaaaggcaagccatgaaaaaactatgatgacctgttaaaaagacgtatttaaattttgtaaatcttgctatcaataaattaattaaaagtcctacaattaaaatcgtcattgtctctacgcctaatactttttgtgcaacagaaacaatagcttcattatttggaacaactccatttatatgaaatccctcttgtatcatttttccaagaggatctaggttagatgtaataaaatctgctccagcgccaagcatcaagtaaccaagtataggttttaaagttcccgtcataattttatgaccaggtttcttaagtgcaataagtccaacgaatgacataattcccattaataaagccggctgtttcaatacgtctctaaaaaactcaagaactgacatatacttaccccctatttatttaattccatatacttctttttaataacttccaaaacatcttctgttatcttctttttatttatataacttctcactactgcaacatctctattatcaaactgctgagcaagttccttgacagtaattatcaaatctgccttcttcccttgtgctgaattaaaatcagttgattcaacattagcttttatattgttttccctgcatatttcctcaatcttcatagctaacattaaactacttccaattccattgccacaaaccgttaatatttccattttcctatctcctttataatattactaaaagtcctttaagctaatttaaaagctttttgaattaatatagctaagaacatcttcttttaaagatgaatttcttacaatgcttaaaaattcattatcctcaataagtgtcataagttcggccaaggcttttaaatgcgaagtcttatctattgcacatataaaaatcaatatatcaacaggatcatattcttcattaccgaattctataggcttgttaagttttataagccccataccaattttcttaactccatcttctggtcttgcatgcggcatagctattcccttttcaataacaatgtattgtcccatattttttactgtatttatcattgcatcagtatattttgcttctgtgtttccattcttaacaaatagacttccacaaaatcttatagcctctatccaatcatttacttcaacatttaattcaattgtttctttattaaataacttttcaatcatagccttgccaccttccttaatgctacaaaatagaaaatcctaaacttgatgcatccttataaaaacttcgtacagtttccaaagaatattcgtataaatcttttcccatagtagtgagtttctttaatatatcattagttacagtaattatttcacaaccacattcatctgcttcaacaatattgtataattccctacagcttgcccataaaagttctacacctttattggctttacaaagcttgctgctagtcatcataagcttcattggattagttccagcatctgctattcttcctgcaaatacggacacaatgctcttaacttctggatttaacgcagttaccacatctttaacctgatccaaagtgaaaattgcagtaacattaagatggtatcctttttctgataactttttaattagcggaattgaagattctcccttagtgttcatgataggtatctttacataaacgttttcacccagttcagataaaacgtctgcttccctttccatagtctcgaaatcatctgagaaaacttcgaaagatactggtaaatctttaatttcttctaacacatttttggcaaatttcttataatcatcaattcctgccttcttcataagcgagggatttgtagtaaagcctttaacaatacctcccttataaacctccaacatttcatttaaatttgccccatctgcaaatattttaatatttaaatccctaaaatccatttatctcctccatcaaattacttgttttactttataacccaattatatattccaagtaacaaccagtaaagctcaatatatttcatttcgattgtggcaattttgtagtttataataatctatttttataagattgtctcatttggtagtgatataataattattatatatatattgcaaaaataattcttcatgacaattctaaaaatattgcaagaattttagctgtaattatgaattgtgaaatgtgaattgtgcattgcaacatatatattaagctataatctaatagataatatgatttttcaaaatttatataatgatgcaaattaatcacaattaagaaaagaggaatatatttggaagtagtaaatgtaacctacaaaagtatcgatattttttcaaagattttaaatgactctgccacatggcttaattctataaatcaaccaatgtggaagtatgaagatataacaagtgaggaattgctaaagaaatatagtattgatgatatgaaattatgctacgagaaaggaaacttaatcggagtatatattttgcaatggtatgatcctctattttgggcaaacttacagaagaatgaatctggaatactgcataagttagctgtttgtagagaaaatgtaaaaaagggatatggacacaaactgatacaatctgctgaattaatttgcaaggagcataatgtaaaatggttaaggttgaattgtggtacatttagagatgggctgagaaacttttacgaaagcaatggttttaagatggtagacagagtatttattgataatagagatcaaattaggtatgaaaaatttctaaatctataaaaaaatcgcaggcgactgtggttacgtttcgtattgtgcttcgcactcttttcatatgtgtagatttttttacgcatatgagaaaaatttcgcaggcgaatatgatttattctttatagtaattagccctagtaaaatatactactataaagttatccacagatttaaatgactttaaatttagataaacattatatatttatctatgaaaatatttgaatatttataattgtgttgtgcataactaatatactatagggagactaactatatgaagtcaatataagttaataaaaaaattatattttttagtcaataaaaaagtgcatgacaaataaagcaatcacattgcttggaaaattaagaaattaaatttgtgaaacaaatgaagtattggtttttaaaagataaaaaataacacgtattagtttttttgctacatggctcatagcaatatagtaatgcttgccttcactttgcttctttgcaagataatccccaaaagtggaatcacgcatagaaacagttctagatgctgttaatatagcccaacgtaagtaggtagaaccacgtttaaccataggtgtatgtgtagcattatattttccggattgatatgttgatggatcaagtcctgaaaaagctaaaagctttgctggatcagtgaatctatctatatctccaatttcagctagaattattgaggctagtgtataagagattccaggaatactcattaaaggagagtctatttctataacaacatcctttatttgcttatctaaagcatcaatttcagcttgaacagatcgaattaacctaataatttgctgaagttcaaaagataaagaacgtgtgctagttccgatagaattgctagctacttcctttatttcaatagcttttgctctactatatttgcctttagtggatttagccagaaggtttgtcaatttagttaaatgacaattggatatttccttcgggctcggtaactccgataggagagcataaacagagacttgatgaatagaccaaacatactttggtaattcgggaaaaattatatctataagtctagtaattgatagtttaagcctagatctataaccaattaagcgatatctatgactagttagtgactttagctcttgaatttgatatgatacaggtgaataggattttgtatcatcagagaaaagcattttagcaataactagtgcattccgttttatcggttttagttttcctaagggtttgagccttacggaaaagatttgtagctaaaggattgagaatggataggtgaaagcctttagcatacaaatagttttggagattagtgctataatgacctgttgattcaagtcctatttttacgttagaaatatccttgttaggtagggcggaaagtattgaagaataaagtaattcaaaaccttcacgtgaattggatatacgtaaagaatcattaataataacaccatctgaatcaataatgcagcaatcgtgtttagctttagctacatcaatgccaatataaatcataagaacaactccttttttaatttagtccgctatgctccacgtagcttcatgctaaatgtatccttgctctatataaaacgtcatgcgttatctaactaattaacaaataagcataaagctgtggttatatcctcaattgaaatagtctagctataggtgaaaaaactaatccacagcgtcttatgttaagtatagtaaaaattattaagaaaggaaaagtataatgaatttttactacatgttcattatacaaggtgacgcaatgacatatatatcaattgatttattaattgcagctgtatttgtaattatgggtgtattatttataaaatccaatggaaaaggttgttattttatttcaggatataaccttgcatctccagaagaaagaaaaaactatgacgaagttaagatctgtaactactttggaaaaacaattttgatatggtcaattttctttatcataggagctcttgtggattacttctattatggaactggaatgaaacttgcattcttacttttaataattgccctagtatatcacatttatatacgctataaaaagtttgatgaaaagtttaaaatataaaatgtgctatatagatatctaacctagacctgaacttatgcatatagctcactgaaacaatgattatgctgttgttccggtttctactgaaacatttcacaaaagcataattcatatttctagttgagatatatttcagagtataaatctaatttatactcgacttaactaactatatagatcaacaaattcacaagttttctaagactttaagttcatattttcactagaaatcataaatatatttgtaaccacaagggtcataatatggagaaaacatttgaaaatgagctgttaaaggtttttagctgtagtttgttccattttagattgtgaagtaagagtccaaaattttattttgggttctcgaacttcctcagcgaatgtaatgagtcgagcttccctagggaaagtttgggcatgctaaagtggatacaacctgctgcttagaaccttcagcgatattttcatagtttttcggaatcaaaatatttatgatctaggtggtttataaacttaaagctttttcatcttctccttaattaagctaacataacttccaagcaccgcaagagttcccacaacttcatccagatcaaaattcaaagtgtgtcttttcatttttagagcttcctccagcttaaaaagcatagatgctccttcctttaatccaaatttatcacaacttaccgcaagtctattcacttctcttaaattgccgtctaaagttacgcttactccacttaataaaattccatccaaaagcatttctatatcatcaatcacagttctcaagtcttgattattttccataaaatcacatcctttatgtaattgaattaaacaaactaccgtatacatattgatagctatattacgctgtcttttatgtaagataagaagataaggcaagttaactcaattaccatctatatagtcaaattcactaacgtaccatttttataataagctgttatagggattgctgtaagtccagtttcgttaatgaatactttactcaagagcataaccggatagtttttcattctttccattctctctagcttttctataagcttcttattataactagaatacttaacttcaatggttacagattcttccttctcatcatataacggcattttgaagagttgatgtattttatcaaagctgctttctccaaacttcaatggctttataagaaataaattataattttcttctctttcattaaaatataatcctgagttcttagaaactgctgaaaataaatccttccaagaattaaaggttttgtccttaagataaatacttggaatatctgtggtatctataatttctcctttgctactttcactagaggataacctaaaatctccatttatttttccattaataagctttactctagctttagagaagctttctatatcagaagcaatcctccaaggacaactttctctgctataggtgtttttattattgtaggatgaatttctagatatagtgtaagtaaaccatttgttaaagccttccactgtaaagtaaaatgtagttccttcatatcctgactctgttatccacttgttagctcctactgctataagttctataggaggaatttcataataagaacttttatgctctcccattaattctactaaagttttttcatcactgcagttttcaataaccatggtcaagacataaatgttttgaagcaaatacctaaaactttctacagaaaaagaagcatttttattaatatataatctaagttttccttgaagtgctcttattttcttctcaatacttggaatatcgctattatgacaaataattgatacctgttccagtttatctaaaaagctttcaggaattcttgcaagacctgtaaaatatatttcctctagagtttttctaacttcttttatacagctttctaaagtttccttacttacaattttgtccttagcaattaaagaaataacttcttctttctttaacatgcctttgtaaatgccatagtgaattactgcctctgccttatgtctacaaagcgctttactcttgcagctgcacaaagcattattgactatactgctatcctttattgatatatctttctttttttcgccattcacagaaataaactttacagtttcttctcctgcaaattccacctgaaggagggcatcttcttttatatctgcttttaatccgaactccattctcttaacaatatttccaaattctctgtcacccaaagcagtttttatactctttaagtttatatttaaaagttctgaataatctggactgaattccttctgttgtattgatatttccatttcttcactagaatccccatttaaagaagagaactctccaaagatttcttccatatgattctttatatataagtaactcattacagtatgcttacaaatactcctcgaaggacagctgcacttaaacgcttgtatatcttcatttacgctgcatgaatttccatctggcagttcacattttatagatgcttcttccactgtaattttaacaccagcaccagagcttaaatcctttgaagctctattaaatatacctttattagtaactccaataagatactcatcattaatagaaagaatatacgattttaacttacttaagaaattatctttgctatccatttcgctaaccctcctggcgtcattgctgcaacatcagctccaagtgcagtcattttagctgcagccttcttatcataaaagccattcgccttatcatccaaagctgtaagaattataagcctagctccagtttcaactattgccttagcccttgcatacattatgttgtaattataaccgtcataaagatcggtcaccattacaaccatagttcttaaaggactttctattaatttttctgcataacctaaagcctttccaatattagtccctcctccaagctgaacactcataagggtttgaactgaatcatcaacataagaagttaagtccactatttctgtgtcaaaaataaaaaggctggtttttaacataggaagctttgagaatatacctgccattatagcactgtgaataacagaggaaagcatactaccactttcatctacagcaacaactatgttccaaggattgtattttcttactctgccataaaaataaactttatctacaattattctctcttcttctttatcataattttttaaattagctcttatagttcttttaaaatcaatgtttctagcagacttcacagcacttcttttgtttctgtccacttttcccatgatagtaagctttacttcattttctagacttttagttatttcatcgactacctttttaactatttttcttgcagtatctaaaacatctcccttcattaaatgtttcatctgcaatatattttttaaaagctctgcattaggctccatggcctctaacacttttttatctgttaaaagctccttcatattatacttttctagagcatgcttttctaatatttccactgtttctttaggaaataaggttctaacctttgttatccaagaaggcactgtaagcttagcgcttcctcttcctcctcttgggtcatctactcttattcctctttcttcatcatagtccctatcatataaaaactctagcaaatcactaagctctgagtaattgctgctatcttcccaaaagcctattctatcctctgcaaactttccaagtactaatcgccatctatttaaaccaattaaattttcattcataccttaccctttctcttttaaagtaaaacttacacttagcaaatattatttcacctcatataactgttaactcaaaccaattcccacaatataagttatttaatctgcactttatctagaatcttgcatatgttattttatggatgtatattccacgtcttcaaaatctccattgcatatttatctaatgatactgctaggtttatatcctcttcttttaatgccttttcatatagaatgctatcatcattagtgctgtacacttttgctgcctctttagcaatactgtcaatttcaaaaggattaaagaatgtaaaactaaatctcaaatctggaagaagtaccatgaactgctcctcttctatgtttctcataaagctgtctattccattaagtaaatcctcttcaataagtaataaatctttagctgtagaaaataatccctttaaaaaacttcctgacttcataagtttttccccagttccataaaggtactgcatcgccttatctgttacttctttagaattaatagaatttaatccgtataatatacctaaggctgctccttcaactgcgctgtttagattcttcttattaataagcagttttaagctgtcgattaaggtttcactatcaaaatcagctttattagaaatatgataaatatcttttagcttagatataacttcattttcattgtcataatttacagtgtttaaacttgttatttgagacacagctttattataggccgcagtaaagaattctttaagctttttattcatagtaatgttaagcaaatcctctgaattacataaaaaatttagattgtaacaagaatttgtaactgaaataaaatcttcatcgccatttaagacctcaccaaaggcaggaagaagtccctgaaaactgctttcaacgcccataagtgcagcttctattaaaagtagtgaagcttctccagatacattttcacaagagataaacctctttgtaagtatagaactcgctgcctcctttaaactcccgccatgcactgaaagttctataagtgtactttgaagtttagtagtccatttatacttccatacttctcttactaaattgatatttttccttttaataaaatcaggtcccttttccatgaagcaaaagttagtatttaagaacttcattatatgaaaaaacttactttgctccctatgctttttactcttataaatacttaatggcacttcattttctaaagtagtagtttttatgttaaactttctgcacaattcattaaaatcttgtactataggtggcacttctgctaatacgcatagcttacctattttatttcctgtaagcaggtctctcaaatattttaaagaaacctgtgcctctgcatccatttcaccttttacaaaagaagatgttatgccatccttaagctcataaactccacattcatacttgttccttagagatttaagtccctttgccatattaaaggcctcaatttcatctgctgtggaaagatttccatgattttttcttataagtttcccgcagtgtacaatataattaagaactgcttcttcgtaaggcttatccatctttttttgaatattttcaaaaactcgttgataaaaagcaggatgaggcattccgctggcataaccatttaattgatcactttcctcaaaagaataggacatggcatatactcctgtatcctcttgtgctatattatgaagagttatttcctcattagattcaagtccatcaataagagcagaagtatgaaatcctccgcttactacaagaactttattgtattttttaacagcatcccttattttcatactcataaatttttctctagaaagacatccatcttcttttagcatttcttcattatagctttccctagaaagatagcaggaaaatatcatattttctatgaatttctcagtacttatcttaagtccatctatttcaaataatttttcccaaagctcattataatttctgcagccttccttttcacaaagggttttaataaaaatactttccttcattaaataatcatcattataggtatttttctcctgagcttttcccataacctctagttttttgctgtttataagtatttcagcatatgataaatctatgaactcgcaggcaatatttttcttttttccttctcttaatgctaaaagctccggcgaaaaatctaaaaagggataatagcacctatacttttctttattttcttctataaatgaatttctatcaaaataactatagtaaatgcatacaggagctttagtttcctcatgagctatatattttattactttattagcatctgcaggcccttcaattaatataatttcaggattataactctctattacctttttcagatgaaagctacaggcaggactgtggtgtcttactgggaaaaacattactttgctttctaaatcataagcttttttcacatagttttttattttattatctatatccctattacctatatttttacccatgctagctccacctttatttaatccactttttagcttcatagaaatccttccagttaccacccatttttgtacttttacttttaactacaatgttaaaataactccttagtttatccacatcttcacggctttccttaaggacagaacctaatatgttttgcaccatagtactcatatcaattttagaatctccatagtaaaagctactcataagagtttgataatatactgatactgcctcagctgtactcattactgcagaaggcttgtctattctgctgccttcagaagatattccttcccttaattcatgaaaggttgtagcaagaatttctgctgcatctctatcaacttcaatatcaatattagaattcttaataagcttctcaacttctccttctataatcttagcttctaaagaaacatcacttattgggaatacagtttcaaaattaaatcttctctttaaggcactgctcatttcattaactccacggtctctagtattagcagtggctataacattgaaaccaggagatgcacaaagcagtccttcttctccaaactctggtatatttaaaattttatcactaagtacactgattaaactatcttgcacctctgctgggcatctagtgatttcctcaaatctagttataattcccttttgcatgcctatatacaaaggagaaggcactaatgcttctttaactggtcctttagctaaaagcaaagcataattccaagtatacttaatcatatcctctgtagttcctgctgttccttgtatagtgtttgtactacatccgcaagtagctgcagataaaagctcacttaacatcgttttagctgttccaggctctccaaccagcataagtcctctatttccagctaaagttataatacatctttcaataagagtatcatctccataaaatttctttgtaatattaacattctttctttttatctttaaaggcttactacttcctaaaataaaagtccttacagccttaggagataatctccagttttctggtttaggtccgtcatcgttagcttctaatgcggctaattcctctgcatataatatttcaacggtaggttttaatgcttttatttcactcatatatactctcctttagttgcagatggacgtttcctctgctgattcgcctatttataatcatcttttttataccatcactacagtaaagtaagaaacacttgcctgctttaaactactttcctataaaatatcttacttattatctacgcatggttctctagattgtctatcaacttgttttaagatttgtggcattctatattcaccatctagctcccttacaaattgtgcagcataatttaaatctaaaccagtagcactaacatataaaggtttattactatttccacgatatacttctaaataatttgtactatccttaaaaaaagtttttgctactcctataacaggtgttttaccatttaaggcttcatataaatatccacctaatccttttttattctcattaagccatacgaagctatcaacaataattaaatctatattttcttttatctcatccaaaagcttcaatatacatggcaattcccttttataaaattctcctggaatatactcatttatatcatggactaaaacattgtactcagataaaatacgctcatcttcatctttttgaaaaacaatacaactagcctttgcataagtttcataatagtaaacatcaaaacacgctacaattacactttccactacttttcaccctttaacctgcaatatctgctgactcaaaattgccatttatatttccgctgactatgatgcagtgtcctgcaaacaattccccatcaaaaaagaaaatctcaaactcaccttcaggataaacacttatggtatccaactctatagatttaataaacatttcttctgtaacttcatcaatttcatcctcttcatcaatccaatcattggcaagttctaaaagttcacttgcagcataagctctaattctatcgttccaatctttttgatttttgaaaagctcatgagcagttttaagagaatctttcattctttcgtcctcatctagattaaaatataatcgtccttcttctcctgcccaaatgatattattctgaaaagtcttaatacctttatctaatttgaattttccaatgacctcatcttcataaaatactggtttaagttcttctgctaatatgtcttgaagctcttcatcgctatggtttgcatccatgagcttcacaagcatgaaggatttttctccttttctaagtttaagtttaattatagaatttcctttaatagtcttttgccattcctttaagccttcattatcagtaagccacgataaattaatctccttttttactgctggctcattgctgtttaaatctttccaagcaataaggtttatagacgccctccataactcttcttttcctcctttgcctgcaccaactcctagagaggatgttacagcagccacctcaaatatctcctctttgaatctgctatcaaaggcttttatctcttcatttttactcataatttcctccttatttctcttctctccacttatcattgtttcctgttttagaaaccaaagccttactcacttgataaagaatttcactaaaatatctctcaggcaatgtgtctatggatatagtattttgtttttgtgttttctcatttatatacgcatacttagacatggttcctaatttgtaaaaacacaaatcatacactgttacttcttcactttcatagcctacagatacgccgctgaaatttagtcctacttccactttatgattattgtcttctttataaaaagcataataaccaccaccatccccaatagctcctctaatccatccaaagtctgttaatttaccaagtaaggataaaccatttaacatgactccaccaaagcgctctacagtgcttctatttctttcttcttctgtaacagtaaatatttctctatttagctgctcaaaaggctgtttgatttcatagttttcaaattgttctttccataaagctatgtcttcactatctaattcaataggatgaacaattcctattatcattccatcttctaattcaaattcttcttcatctttagtattaaagctgccatcttccatatatctaaagctatctgttaaaacattatctttataaatcccccagacaagacctatagcaaacttgtgcataataggattttcaacaaaaagtcttatccaagattcttttgtccattttctcttgctagacaaggccatttctagacgaatcgcttgtatattggcaactgtttttaaccgtttctttaaatttttaaattctacagaagcctcctttgccttagcttcatcatccctcttagctggagctggcaagcttttaagctttttaccactttcatcagttatttctaaagtaagctctggagtaagcgatgcaataaattttctatctccataatcaaaaattctttctcctcttacatcaaagcctaagtttggaactattctatcagaaagctcttctatgtctattcccatttgctctgctgcaaatttaagagccgaagctgctgcatttttaacttgcttaaatttaaactttcttgatatattgtctactattattaaagcctcgttacctccatttagagcaagagccctaactgcttcactagctattgctcctcttgaattcttaggccactcttctatattctttttaagcaaacttattacttcatagtctccataaactgaagcgaatgggagtacccattttttcttactttctgcacctgcatccagccacctttgtaaaacttctaaggcaagtttagataaatcctttttatttaaaagttctcctacctttaaagcttcgctacttaatccaatttcaatacacgaagcataacatataagcatgtattttataatttcactttctgcataagcttcactatccttaaactttacctttgtcaaagtatcacaattcagccatcttatagttgctgctttattgccctttaccccctgcttacagtattttaaaatatctaattcttcattgttttcttccaaatcactttctaaatttaaagcatctcttataagagcctttatcttttcacttttttctacttccaaggctttgtttagggcttccagaactttttcatcactgctctttaaaagcacctttactgccgattccctaactgcctgtttttttgaacttaagctagatatcaccatatgctgctttattctacttgagcttaaaagctttatcactgtttcttttacgactttagaggaatcacctaaatactctataagaatttttgcacttttagtttcctcaagagttttattcaatgtttctaaaataccttttctactttcagcattacaattagggatattttctattacctcatcttcctttgtttcaattaacttttctataattttaactgcttggctgcttaagctatttctgacgtaattaccaaaagcgcaatatcctaaataacatatatagtttttaatagatgctccacaacttacaagtagctcaatgtaagagtttaaatcatcttccgatgcctttttttcctcgtatttaagataatcattatacatatttcttaatatgtctggatttcctatggtaataaagatatccatagcccttgaaaacatcgaagattgatcttttaaccaaaacagaattttagaaaaattaaatgaaaacatgtacatatctctttttcccaataagccttccaaagacttatctatgtcactaaaagaaatatttccttctaagtattgtataaaatcttcataaacctctctttcaataccattcttgtccataaacatagaaaattcatgtataaaagcatcttctgcatcatttagaaattccttaccttctcctttttgccaaagaaggaaggccatataagctttattcatgccaaaacacatttctgtagcttttttaaatttttctatgtgtttatctgcttcttcctttaattcttttccataggtatagttataatttaaattgttagacgctccaagccatgcgatgtattattctcttttaatttgaagcgcatccacaaggtttgatattacattatatctattatattttagataattatgtaagtcgtaaaagaactctttataatcaaattctgcagcaaatttagtaaatctttttgctatttcagattcaacgcatatagtacaactaattcctatcaaaaacctaaaaacatacttattaaggtttaaaactaatctgctgtcattttttaaagtttccactatatcttgcagattggaatttccctcctttaaatattcgattaatacatctttctgcatttcagatatactattattaaataaatttcctatggattcaatcatgtcattttctaaccactggaaatattctttatctttttccttgtaagctaaataagttattattatagttttttcatttatttcgcttatcttaatagcttctaaaaatgaatctctatacttttcataaagactatcataaaacaaaataaatccacgatctaaagttctttcctgctcagtgatagacgtggcataataagctataacaaagactggacttaaaccgtattttaaaaactctttataataagaagttggtttataataacttgtcttatctaagacaaaaaataaagaagacttgcccatttgaaatagtattcttaagtattttgataaataatcattagctttatgcttgactaaagaatgatatacactaactacagcatctagtgcatcactctttaactgtttcatatctatactaggaagtttattaaagaaatcctcttctttgatgttgccttccacatattctttaaaattatcaataacttcatacgttaagtctaaatctaaaaacacattacttattttttccgttaaatgctgttccaatcccattttacttaacactcctcatctacctatacctcattaataatttttataccttctatcttcatcttactttccctacttaacaattatgtattgtctatatcttattttttgagattctactgaaatattgataattatgattaaaatcagttcagtattttaggaaatatcttttaaatatcattatttgttacatcactataaattgtcacgattgataactaccatgctacaccttcatcttcttctatttttgtttttaataagaattattttgtctcctgtggaaggtttaaattcacaatagtttctctcattctctctttcctttccatactttttctccaaattatttaattgtgcattttttacttatatattctcaccgtataaatctctaattttccttgttttaaaagccttctctgtaatttatcttgcacttggctcatgaccatattccgcaacaacatactaatatattaaatctgaaatattattatattttatattcttctggtaacttgtctccaatcaattgaattaacctgttataaatatggctatttataacatctttttcttctaatccaaattccatatcctctaatactaatggctttgaaaattctaatacttcaatttccttgttattaaatgctgttttcttatactttttaaccttaagattttttaaatttgttacattattcttattagcttcctttaaaacctcgtcttcaaatgaataaacctcaattccatttatacttaaagctttagaattgtctattttccatttaaataattcaatttcatcatattctatattcatgtaataaataaaacccaaattattctccataaatcccacataggattcttcaaaacttccataataaatacttcctacagaccacaatcctgtaatttccattaaacacctccatatgtcaacttgaatataatgatgaaaaagaattcatccaaatcttcaacgatatcttaatccatatatgtataattaggtattttaattgattttttgacgtctataattgcacttttgcatcctcaaggattatccacatatttttttcatcataatcttttacctttgcagatactaagtgattagggtataagttctttgcttctgagtttctggcacattcttcgtaatcagcaatagcaattgttttgttctctaattctataatcactccttgagggtagaacaccttcaatattccttcaacttcttttcctttagtgaagtattctttagcacgcaaccaatcttctaaaatgcatttgctacgaatagaccatacctcttcaaactcatttttgcttactatttcatccaattcatttgattcaattaagccttctgctaagaaaaatcccatatccttatcttctctatttgaggctatatatctgttatcacatatcattatttgtctttcagcatatccatttactatttccatatacgtatcgtattcttttccattctcaaaccattcccatttgaactttatatacattgaatcattccttgctgttaagtttttacaagacagttttatattaaataaggttctttattactactgccgctttattcctatgtttactatcaattattccatcaaaatatattgaataacttctaccacaagccttgaatttacgaagtattacattatccatattaagtgtaatctttttccctgtaacttgatcaatataactctttttatctttatgctgtaaccaacattccagaagctctccagatctaactgcaagccagccgttacctccttttgtcggttcatcatcgctgccatatgtaaaagttaatgcatatgtatcgttatctaacttcacactttccatataatatatagaacataattcagtaaattcaaataacttcttttcttctatccgttcaccgccaatgccataaactacatagaatatttcgccgggtctttctacatgaaatatgcttccgccatttgctgtcacctcaactgtctcatgatttttccaattgataacaggactattcttctcaaaatatgcatccaaaaatataccttctacataaactttacgttccttaatagatattcctttatcatcaagtaagcgatgcaatatcacattttcatcaattgttgaaaaggcgtgtattccttcttcgttatacaagcatctacttactaatggctcttctattttcacacgctttactgactggaagtgcttatccttagaaaatttatattctcctagctttgtaggttttttattaaaggttccatcagtataagataatatcttatctccatctctaaaaatatgttcagctactgatgccattgctttacaatcctcgatatcctttctatctcctataggaagacatacaaccctatttaaagatgtttttgaatatccaattacacaccaaatttcatcatttggcccttggaacagatcatatgggactccttcagattcgcagtaacatgtggtttgtaaagtttctatatccattttaatatagaaaaagttatctttatatttctctagttcatctaaatgtgatgcaatatcagatacatctttatagttattcatactaaaaaatatttgattctttgatggtaaataacacatatcccctgtgcttagacgaaaatctgcatcaatatatataccatagaattcattcatattataattgctgattttaaaaatgctgttatctataattaaatcatccaaagttttccctcctaatatatataatataagaaatattcctcataaaattaaaagtttgagctcaataaattaagatattcttcaggtattacctttgctaaaacttgttttgaatacaaatatcttcctaatcttctaccctaatgttttaataatttcctcgattgatataggaatataattatttgcatcaacacctacatcgtatctctttatttcattttttagcatttcaagattatatgtaatatctgaatgtatatgtccatgcaaatgaatagaaccatgtccttttttgttccattccagtataggataatgaaacaatacaaatttataatttctatattcaatttcatgataatctttaatccattgaaataagtctttattaaaagaattgtcgtcaataaaattatcatgatttccttttattaagtatttagtaccacataataattgtaaataatgattggcaattattccgcctttcatagtaaaatcccctaaaatataaacttcatcattaggtcttataacattattccaattctttattaatcttccattcatttcatctaccgtatgaaatggtctgtttgtgtgcttgatgattttttcatgattaaaatgtaaatctgatgtgaaataaatcatatttctctcctaatcttccaatatactattttaatttatcactctaacattaatatattaagcaatttctacatagtttcataatcaatccaggttttatctatataaccacaatttgtacagcttgtgcttattgtaatccagctaaaagcatttacccagtcctcttcactaaactctgtatcttcacaattttctaagaaatcttctttaccttcagatgaaatggctactgatacttcatggtgctcgtcattacattttgggcatttccataattttttaaatttttccattggaaactcttcatatccctcaaatccagattcgtcaccacaaacgaatccattccaaccatgaagattatcatcaaatattaaatgtacttgcccacattctttacatttgcattctattgctaaataaaaaacgccttcatattcacataatgtaataatttcgttctcatatgctccaaggtaacttaaataaaattctttatttccgcatgtacaagcaatatctgctgccacaaaaaattcatcattctcgtctcctttaggaattaatatatttttaagatgtgtcggtattggtaaaatgcttttttccattatttattcactccaatcttctaatagttttttatatttctctattatctcttgcaaattctttttcaattaattcatcaatagacttgcataacaatctcatcacttatagcaaaattacatagtttagttctaagcaaatataacttttacaagtacccaagttcataataattattaatttgtggatattttaatagtatatattcgattaactcatatgcattttcatcatactctgatttctcatgttcaagcatatatctcccatcaattaattgaaagacttcaattgctgtaatttctttgcatataggcttttctaacaaatatttaatgggtttaagatcatcatcgtaattaaatcctaaaatataaccatgaataagttctgaagtatttaatttatcaagcttactaaaacattcttcatcatataataaaccatcaattaattgtttctcctcttcatagagtctaagacgaatggaattatgtgtagctattagtaaatctgctatattacaatcattccttgcaaaaaaccacggtgtatcaatgattccaatgtctgaattaagttcaaatccatagtttatcaaatacttaataacatcaacatctttaaatttaattgcttttatataggttcatatgaccccgggataaattactagctctaaatagctacgtttatctcgttttttcttagaattatattctatttttatataacatacaagtagtgataaatggctttactacttacttgtcaaagaaaggtgggtcaaatttacctatagaaatgtcttattcataaaattctgtcaattccctttggttgattttagaagtatgtgaataactttatttttcatacttatccacagaatttaaagttttttgagtaatcgcctcaatatctttgaaaaaatctaatctctttatctttgctgtatctctgtattctagatatatagctgtatattcccgtgctgaatgcacacttatatcaagtaatcgagatatttttattgaatccacagttttaatttcttcaattatattttcaacagctttatatctatttatatatctatctatactaactatcttatggtctgttctactttgtatttgtttggttgtgtaaccatttagataaagctctattatccatcgtttgtgtgttgtagttttccccatatcatgtacaaagcctcttaacggtacaattctaccttctctttcaaaatactcttttacatactttgaaacagttgtttgctttatattcagcaggcttgcagcaactgcgctacttaaaacgccctcttgctctatggcttctttagctatcctcatcaacttgtcttgtgttataagtctagatggcttattagcctttagtgcttctgtatcttctgaagaatgtagcgttagtgttactgttacaagcgcagtatcttccatattctgtgaccaacttggcttatcatgtatacttggtactacaacttttatctgtcctaggcctatatcatttttatccacataacattctttagttatgttttcaatttcggttgctaacaaatcaagtattttaggctttccctgatatcctaattcttgtttcaacatttgctttaacattgtcgcatatgtcagcttcgctcccggcacgtagtgctgccttgaatcatttttgcaattatttatcatatgtccattagttcctaaaatttttttcttgttcacagtcaatgtacctgtgaaatctttctagcattttatttaaggaatcagggtatgcctggctatattttgtgtataactctatataactatctattaagtattctgaatatccagttaaagtcctaattagtagcttatttttaccttccctgtggaaatatgctattctcacaaacttcttttcatagttttccacacttgcctcagtatgagctgtctgaatcattacctctgaatatgtataaccttttacaagaagttcaataattttctctttatgagttatccccggtccaatgtcttcaatctgacccctggttggaacaactacgccttctatacgatactgcttaatataacgctttattgtgcttatacttattcctaatatactttctatatcttcataactaagaagaccaccttgttcataatcctcccaagctaattgatgaactttcattttctttaagtagctgagtccatttttttgctcaaccttttcttcaccattaaaattcatagtgagagttactggtataagcctacagtctcttattctctttcctgcaggttcaccatttacaacaacctgtctgactatctgattatggtctcttacaccactactcatttcttctttgaatagctcaactctcttaacaagcgctttcgcttcgataggacttagtccatattcttcttttagttcattaaacaaaccttggtatggattcttactctccattctttcaactgccatcatccccatttggtaatcctccattcgttagctttcgctaacattattatatcttaacccgggtcatatgacctaatagtatcatagcattttgtccagatttatcttttaaatagggattggctcctttgtctatcatatctttaaatatatctagtggtaatttattaataattaaattatgtagtattgttcttccaaacttatctgtttcattaatattttcactcgtataatatttaataatttcatcatattgtttttctttaatcaatttttgaatcatataattccctctttcactaatacgtactttttttagataatactttcatatattcagcatcgtgatacacaattacaattggtattttaattctgctccattgatttctaataaaaattctttatatatattgggaatgttgtattattctctattaattattgccccatcaattattctgcggagtgttactgattttcagcaccactccgcaagttaaaatttatgaaaattatacaatttgctcaagtatgcttggatcttttattttgatatcttctgctaagatagcaattttagatattatctctgcactccttggatcactgtctataaatggtaagaatagttttcctctttgtccagaatgaataggaattatgttaatagcaccgcttcccatcttatgaaccacaccgcttcctaaatgaacagtgtattcaccatggactcctgaaatatgagcatgagttccttttagcttaacattgcttaacttcataagctttaagatttcctcaacaattgctgtccttacttcaatagttgacatgcttgcttctggatcaacgcctccaacatgagctacacttactactaaatctagatccctcattacctctgaaaaaatcaattttgatacttcttctaaatttaaaggcttgtaagtttttctatcttcaaatcttacaaattcaattgtaggcgactctatatctgctggtgaaaaccaatctgctaaggcatatatagttactattatattttccttgtaatataccttttgtaatccttcttcatcgcttgccatccagcccctagtctttaaaagtgccaaagtctttttaggctgtacttgatggcctgcatatcttctcgataaagtcttttccttcaactcatccttatttggcaagtaaagttctctaaatacctgtttaaaaggctgtacaattttcttttcaaatatatccttttgataatctctccaaactttagcttcatataaatgaagtggatgagcaattataatatcatcatcttcttttaacttaaatacctcatttttataatttatcaatctattttcttgtaaatatcctataaaagtattagttttaaaaacaagactttttattattggcgctaatactggatttttacataactcaataagttctacgcctttaaatatatccccattttccatggcatcttcaaaactttttcttgcccttgcatattgatcctttagatccttctttaattgatttatttccaatatatactcgtttttcttaagctttgctggtatactctttaatgcttttcctgccttaatacaaaccacatccgcttgtccaaattcatcaatcacaagctgaacttcaacttcgtcaattgtttttggctccaaataagctagtacactttgaatttttaaagtttccatgttccaaataagcctatttaaatccgaaaatccagcatttctagctaggttaagtaatgctatacttccacttcttctttcacttgcctgtctttgtgctccaaatttcttactttccttagtaaattcttgaatgtactcatatctttctaatacatcttctttattcttaactggaattaatccataagtaagcaaataatccttatttctcttatccttaactctatttttaacttcttctaaatcaagttttccaagtgttgcatctgcaaaaagctgagatctcttatgtagagcaccacctgcaatatattttgcactatcgtaaaccaccttaaagttcttctctccaagagtttcatatgcttctttaaaccattcctgatcaaaggctccatcctttaaatcttcaactgttataggagtatatcttgccacaatagcagttttttcatctgaaaaataatcattaacgtgagcgtggaagtaccaacaggcagattttagtccttcatagcccaaatattcagctactatatctaaccatccaggtgaatacatagctgcttcaatcagctgtttactggttacttttttaccctttaagaacttctttaaagttgcagctgtttcacctgcttttggataacaacattttaataaatgacttaagatttgtttcttagtacaatttccactcacaaaattatagcctctaatataagtatctttctctgatgctaatattattgaagcaaaaatgtttactccatagcatttttttactttcgaagctaatagggttatttctgtatctaattctcccctatttacttctatttcacctataacttctacagccttacctgcaagttctaataacttttcatattttataactctttctctatgatatttgtgtacactagttaataactcaatatttttactactattaggtcttcccataatttcttttaaagcttcattgtcatctataagcccaaggtctaaagcccttccaaaatcatatatttctaagcttccgctaacgttatactcactagctttataataattataggctatattaaaatactccttaaacttatcatcagtttctgagttattttttaaaaggtgaagccaatcattaatttcacttgctgctgaaaaatacgcctttattttagtaccactattatagtagcttccttctgaatattctttagcatgcctatcttttggaatcactgtatatatatattctgttattgttttactgatattaaaaatctcatcatttgctatttcatctgctaacaaaataaagtaatcttttatcaactgataatattttattttctctagacttttactaagctttttaactgttccataattaaaattcatttctaaaaactcatcataccatttgctattagcagaataccttctaaaatgaaccgctttaatataaaaattcaactctaaaagcttccaagcatctaaaccaatattccttgctgctgtcctaatttcctctgctaatgggtaattatttaatttcctactttctgtgctaaaaggctgaagataataggaaccgcctaagataatcatctctttattgccatcccagcgtgttgtctcatattctaagtctctgtttttatctattagctcgctgaaagtattaactatcttaataatttcctcctctgtagaacagaatttgctttgaatatcaaaattattatttttaatttctataggttcataatcttttgatggatcatataatccaaagccgttatttaaatttttcacttctttttgatcattacctatgttttccgtaagcagtttacctttctgcaatacctcttccatagcagctacggcttttaagctctcctcaaagataggtttatggtttgtatcaccttcaatagcatttacagtatctatggcagccagctttttattttcatctttgctatttatgagattgttaatacttttcattaattcctcattagattgttttaatagcagctttattgcattttttctcaaatctccagatttatatttaagtaaatcctctatatatacataatcttccctgtttaattctagagcattaatagtcttaaaagctgcttctctaacagattgccccctatctccacaagcttctattagagcatttctttgcttaagattttcaggctcctttaaaaattttttcactaaaacttctctagcctgaacactcatcttatccttataatcaatcaatatatcaagtatttcatcattatagctcatacctacagctaaaagcatattatccattagctctgtctttgtaagtttaaagcttatccatggaaataaggattccttaaaggttatttcctttttaggcatattatcaagtactcttttcaatttattaaaaagtcctactccataataagcttctcctagttcagcataaggtttaattaaatttttattataaatcaagctataagcatttatacctgtaaatatatttttcaaagccgaacctacaacttctaaatcttcatcctctaacatttcacaagcaattttatgcttataggtttcaaattgaatttgacttaaaaactgcagtgctgctaatttcttatattttacctttccatgtaatagttcatttaatacctcttttgcatcttcaagttcattaaaggcaacagaccaaatacctgtatataaaagtatattatcatctgaagctaagcactcctcttgatattctttatcctttaacaccctatatacagcctcaaagcattttaatatgagctttggtttttcagcttctaaatataatcctgtccatacactaaaacctcttactacagaagaaaatctaattaaattattatctattataagttttaacatatatataaaggcttttttagaaccttcatctaagttttcgactataacctgccttaaaccctcttgaagttttgctgcaagtaaaagctctccgaggcttctatgagcttcttcattttcactcattaataatcctcttatgatttccctagtcactattgaagtattattatcactataaattacttctttcattttttctaaaacctcattattattcctgtcaagctcaacagctataatatctgaaataacacctataccattatacttttccttattattttcaaaatattttactaaagaaaagtctgaagcctttaaatatataagctcctttagcttttcaatgtttttgtttaaatatagatgtgaagatttttttgttctgtaggatcttctgtaataaccaatagaataaggatatttacttgcattatcccaaattattttaccaaactctgcataatcttcctgtagcaataattctaattttttgtaattttctcccttaaatacctcttcaatcgcctttatacttttataccataaaagcacttttaatctatcagcttttttttcaagttctctatatggtggattaatattttctgtaatttctttagctaaagctatattcttatctgaagagtttttttctataatttcttttaaatatctaaaaacaatttcttccttttcgttatcaaaatacattctacttcctccatttcactaccacagtctaccagaaagcatagtgaatcttataaaggttaatgtatcatcatcctttaactctatctcttcatctaactttcctgcctccttatcaccaacaaagaccttataaattccgtcttcatatgctaagtatgcagactccagtgctttgcctagatcctgcttggagtcattatacatacttccaaaggaaactttgccagtttcagctttatcttcaatctctttatttgtaagataatctacaagtctttccttttttatattttcattaaactctctaacattactcgtaactgtatatttaattaattcccttaaagttgaaggtacgcacttcaacaccacttcctcttttgttataaaatttttacgtgaacctgcctgctttatattaaaatataatttcataatttttacctatccattttccaattagctgtaaaaccagtcttagcttctaacgttctgtccacatcataaagtatttcactaaagaatcttttgggtaccttcactggtgaaataatgttctcatcagttacttcatcataaacatagcttcctctttccactgtgtttgctttataaaaaaacaattcataaatagtagtttcttcatcttcataataaactccaagataatcaaattgaagttctgcacctattcctattttttcatcttctttataaaattgataatacgctcctgcgtcttgtactgaacctctataccatcccattttagtaagcttacctacaagtgaaagcccattaatcttagttccagcaaaacgttctatattcttcatttctttttcttcttcagtcacagtataaaccttcctttgaagctgtggaaaaggctgtactatttcataatcttcaaattgctgcttccaaccttctaacatttctgtttcaagttctaaaggatgcacaagtcctattagagaattctctataagataatactcttcctcatccactgtattaaaactaccatcttccatatatctaaaggtatcctttaattccccatcttcataaatcccccaaaccaaaccaagagaaaaattatgcataataggattttctacaaaaagtttttcccaatcttttttcttccatagtctgtttactgcaagagccatttctagtcttaagctttgagcagaaacaatagttttcatctgtttctttaaagctttgaattcatttgctgcatctttagcttttagctcatcatcagatttatttggttttggcatagtcttaattaattttccagtattatcagaaatcttcaaagaaaaatctaatcctaaacttacagtaaaacttctgcctccaaaatcaaatactctttctccccttttgtcaaaacctaaatctggtattatcttatctgctaaatcatcttcagttaaattaaacatctttgctgctgacacaaaagcttctcctgctgcttttttaatttgcttgtgtttgaattttctagcaatgttatctattattattagagcatcatcacttccatttaaagccaatgcttttacagcctcacaagcaatagctccccttgaacttttagcccaaacatctatttgcgcttttaatgtgtttactacattgaagcctccaattgctgaaactagagctagtacccatttttgttttgtatctgcaccattattaatccaaaggtttagaattacatttccaagtgtatctaaatcagccttattacacctttctattaacttttcagctgtaagatttctttctacaacattttcaagagagtatttacttataatataagttattacatcctttgatagcacatctccatcttcatactttacgtctacaaatccttctacagctatccattctggggccgtataagaagttttcttgagtctttcactgcagtaattgcttatactattagcactttcaagtatttctgtgtctaaataatctgcatttacaatgtttaaaagtaagaccttaaccttttcatttttttctttccccgcaaatttttcgatttctgctttaaattctctcatatcaaaattcattaaaattctggcagcaatttctctagtggcagtctttttgcttgctaaaatcttcaaaacttgctttttacattcctcataagaactaagtagttctgcaattctatctctaataaccttggaattatccgataaatttcccactaaaatctcagaatatttttccttattggttttaaataaggcctcaagtacaacttcttttgattctatctttaaatcctctaaaatatttatgagctctgtatttccttcattacatagcattcttaaatattcctttgattttgggtttaaaactgcatcagcactaagaattaaatgcctttcatttatacctgtaattaaaagctttttagacaaactcataaaacttgtttcttgactttcaattacatttgatattactgaagctgctaaatcatattcccctgtattaactgctaaatacaaaaatctatgtatgatatccctagattcctccaaagaatagagcaatttaaaacacaggccataataatgccatatatagcccccatgtccatcatattttttaactctagcaaaaaagccttctaatagatcttcattttttccttcaagtatatactgcattatcttagtcttttctactttatctaaattttctaaagctcttgcattatatacaaagccataaaaaacatctccgacagtttctttaagtttatcaaaatcctcttcttctttagaataactataaataaaaaaagcaagagaaaacacttctaaatcatgaaaattattttgtccaagcttctttttcttcaaagcttcaaaggtttctctaaaagctaacggtatttcctttatcctttcttctatttccttgtttatattcctattttcttgtctaacatataaattaagcagtctctgaacatataactttttatcaatattaaatctatttgcaacatcataactttgtgctgatttatcataaaaacaaacaaaactcaccaagttatcaaataacatttttctattagtgcttttgcgaataatattgctgataacttcctttaaattctcatttacatcacaggcatgatagaaaaaattaactaaagctacttgattattctttaaatatttatttatattttcgccatcttctcctaaactttgttttataaattcttctccaccacctggtaactcacaagaatttttaatcgcaagggcagctaaagccaatttaacaaaatcatcttgtgctgcaaaaaatgattttgttaatatttctttatcctccaatatcatttcttcagcaattgtaattacctctattacacttctatgatcaaaacaattttttataatccacacaagaaggttttccttgtcttccataacttttaaataattcacagttttagctggagaataaaatcttccatttactattttgaaaaagctattacctcctatagcaaaaaacacatttattattcttttgaaaacttctttatttcccataagagtatccattaaactccaaaagctttctcttacattgtagtgactccttaaagcactctccatatcgtatttgacaagttctgctaaatttaaagaatcttctccactttcaatataagctttaagctttataatatcttcatcttttatagagcagttacaaaatctaactctaagtaaatttaataattcatccatttattttcccccattttatattctaaaatttaaaacgaatcatattttggcatattcccacataagtatgatccttagctcagatatttatatgaataaaattataccatgccttcctatttatcataataattgtagtttaaactaaaatatgttaaattgttctttcttaaattctcaatggtttttctataaatttctatatagtttgtcttattgaaaaattatatatctaacgtgggttccgtaaattttataatataaatgtgcattgttactcaatcaaagccttatcattacctaatatttgatcatcaatggttccattatgtaacatccctttaattactacctttttggtatatgtaaactttaccataattgataaaaatggtataatttaaacataataattaatataaattcttaaagagttaagggggagtttttatggcaaaaattatgatcgcaccaagtaaatacattcaagggaatggagaattgaaaaatattgcagaatacgtatctgtacttggtgaaaaagcattatgcttgattagtgaaagtggcttaaaaagggtaaaagatactatagataaaagttttgaggctaaaaatgtaggtgtaaaatacgacatatttaatggagaatgctctataactgaagtgaatcgtattatcaaaatttgtaatgaaaatcaattaactgtccttattggtattggcggtggaaaaattatcgatactattaaggctgttggatactatgcaaatcttccagttgtgattgtacctaccatagctgctacagatgctccgtgcagtgctttgtcggttttatacactgatgatggcgtctttgataaatacttattcttaaaacagaatcctaatatagtcttggttgatactggtattattgcaaaagctccagttcgtcttttagtatctggtatgggtgacgccttagcgacatattttgaagcaagagcttgtgaaaaatctaatgctggaacatgtgcttttggtactactactattacagctcaagcattagctagactatgctatgatacattaattactgaaggatataaggcaaaacttgctgtagaagaaggagtttgtacaaaatcagtagaaaaaatagttgaagctaatactctgcttagtggtcttggctttgaaagcggtggtattgcagctgctcatgctatccataatggtttaactgtattgccagcttgccatcatatgtaccacggtgaaaaagttgcatttggtacattagctcaattagtacttgaaaatgctccaatggatgaaattgaagaagtattagatttctgtactagagtcggtcttcctgttactttaaaacaattaggtatccacaaaataaaaccagaagaaattatggaggttgcaaaggctgctacttcaaaagcagatactgcacataatatgccatttgaagttaccccagaagatgtctactctgctattttaacagctaataaattaggacaagaatatatttaacaaataaaaaaattgaaggctgataagatttaaaatgtaccctatagagtagacactataaaaaaagtctaccctataggttttttctatttataataagattatatagttaggagtgaatacaaatgagtaagaaatttttttcaaatgaagagagaaatatactttctaaaaataaatatgttaaaagagttagtgaaaaaggaattacatatacagatgaatttaaaagactatttattgctgaaaatgaaaaaggtaaatttcccagagagatatttgaagaatgtggttttgatattaatataattggtttaaaaagaatacaatcatctggtggtagatggcgctccgcatttcgaaaaaatggtgttgaacaattacaagatactagaaaatataatactggcagaccaagtgaaaaagacttatctttagaggaaaagtatgagaagctacaagcaaaactaaaacttctacaagctgaaaatgaacttctaaaaaagttagaaatgttagaaaggagtgtggaaaagaagaaatagcagtgtcatcaagtgaaaaattcaaaattataaaatatattattgagaagtacaaatttaaaaatatgcttagttatatgtgtaagatttcaggcgtttcacgttcgggatattatagatatttttcatctataattgtgaaaagtcgcgaatctaacgaagttagagatttagaaatcaaagaaaatattttaaaagcctattattttaagaggcgtaaaaagggcgctagacaaattaaaatgaccctgaacaatcattttaacataaattataatttaaaacgtataagaaggataatgaaaaaatatgaaattacttgccctcatagaaaagctaatccttatagaagaatgatgaaagccacaaaggaacatacagtcttaccaaacttgttaaatagagaattcaagcaaaaatctcctggcaaagtattgctaacggatatatcttatctatttttcaaaaatggtcagaaggcttatttatcgactattttagatgcttcgactaatgaggttttagctcataatgtttcaaaaagcttaaaaatagatatagtaactaatacaatagataagctaatacaaaataacaagaatattcttagaaaagattcatttattcattcagatcaaggagtacattataccagcccaatttttcaaaataaagttaaaaagaataagttaggacaatctatgtctaggcgtggaaactgttgggataacgccccgcaggaatcattctttggacatttaaaggatgaagttgatataaaaacttgtgaaacatttgaggatctagttaaagaaatagatgattatatagattactataataactttagagggcagtggaacttaaaaaagatgactcccgttaaatacagaaatcatcttttaaattagtctatcttttttttaattgtccttgacaaagggtacattttatttctttcttgttctttttaaaatataaaaactagtcaaccaattttttaaattgcctacagattttactggaataaaaattcataaagaataaagaagacttaaagtaagtatacatttactcactttaagtcttctttatattcccctaaacatatcttccagaaattttgaacatatactacatttatttatagaacagatgtgtaggttcctaaaaattaaaatctgtagcatatcacttcttagttcataaaatatttatatgaaaaactataatgtaaaggagtaattatgcataatggttatttgagggatgatatggcaaccccaagtattgtttctttagtacgaggggatgtaaatggtgatggaacacctgataacgtctatttaacaggtataaaaacatcagatagcccatttactcaaaacattacccttgtaatacaggatggaaaaacaggtagatttataaacattcctctcattgagaattcaggatataatccaaagctttctttaggtaaatttaccgataatggtatatatgatatcttcataagtattaattcaggtggaagtggcggaataatgtattactatatttattcctttatagacaataatccacaattgctgtttgattttaattcatacaacgaggaatacaactatagtgttacttataaggataaccacaaggttgaggttgtcagtagacaaaatgataaaaactacattatagatatatcaaatagtagagatgatgaatatatacatgaaatatattacgagaacggtaagcttaaaagtcccattagtggatttgtaaatcctttaagtggcttatatccagtagattttgattcaaataatgtatatgagctgctagtctatcaaaggatagcaggaagatataacgcagattctttaggatatgttttaaataccctaaagtggaaaaataatatgtttattttagacaatcagtatgtggcaattttttaataataccacttattaattcaaactatgtacatcctttttttcttaataagctgtactttgatagatataatcgttaagttctcatttttaatatatctacttataattagaagaagctataaaagcgaaaaaagtaaaaagtattatttaaaatccatccatagattatcttccaaattttaaaataacgatattctaatatggagattagaccttttatacaaattaacaattactcaaaaaaatcttgatctaaattcaagtgtttttgtatactcaagtgctttatcacgaattagatccagaaataaaatataaagctgtactacaacactaaaggttaaaattatgtaaataatccaatactttcattgacttttatttatgtagcagattgaaaatttactagctgaccctattaatgataatggaaagtaattaaatatgatttaacttaaatataaccaagtgaaaattcacttggttatataaaatgaagctcacctgcatgaagaaactttcataactatgactagtaaatctacatcttttactttattaatatttctaattaatatcatcataataatactcataataaatatctgacatattatctccaaaaccccatcctattcctgctgctttcacttttgcttcatgagcctgttctgcaaatatttcttgtaaatcgcatttttgtacataatctaatacatttatatatgacttttcaatattaatgtaaaatttttcatctatatccccatattcccttgtaaattttataccgatttcagtgtaataaaacattagcttagcaattaattccgagtttgaagttaattttttatattcacgtatggcctcattaacctttgagtatcttaatttcccaaaacctctatctggaaaaaactcattttttataatatttttatatttttcgaaaatttctaattcagattgcggtaataacttagctttataatattccttaacactcggatatagttttactaattcaataatctcatttatcaactcatcatcattcctatttcttaagtacttttttaaatcagttattttcaaattattcacgtattatgatacctctccttcattaactataatttatattattaacaattatattatcccatattttatatttcagtataacataaatacgtcaatcctttgaatcaatgattttgtgtatcattcatgttgaatttcagaattcacaattacgactaaaattcttgcaatatttttagaattatgatgaagaattatttttgcactatatctatataaaagctgagattttcccaatggtacaaatctcagcttttttaaaaatgatttaacaatatcaagcttcatactatttgtatcttcaaagccccttaatatgcctcatcccttatgtttcctataaattgttaactttttctatttttaccttcttaaattcttaactttttaaattgtaaaaaagtttcatttagttcatagctatttaagtttagaatatctattgtataatttgctcttaaatattcattactctttgtatcgttacttttaggtattatctcagcactcgcaatactataataaaaatagtcattaggattatctataactggatttataaatttatcatcataattattctttttataaattccacagctattcttttcattacaagaaaccaaaatattattataatcttgaaattctttagggtagaaatctcttggttttatatgttctatatgaccgtcatcatttgtatatattcttttttcacaataaggacaatattcttcctgctcaaaaagtaatatattttccttaattttgtttctaatatcgtccttattataatctttccacgatttaggagcatgttttctcttataatctaataaaaagtcaggttcttgttctttattaacctttagcattttttttattcctaactgatatatccaatcttattctaataatatctttatctagatcccctaaatacgttcttagataatcaaataaatttttaaattcttctgtatcatataaatttctatttaaaagatcatatactttgtttaatttatcagttatatcttcatttcttaaactatctaatttcatagttgtacttaagatatcacctatgctttttccataagtttcacttaatttatcattatcaactaacttaattccatcttcatcttttgccattactcgtaactcattagatgttatattcccaattacatgaggtgagtgagttgctataattaattgattattatgtccaatgctcttatatacatcgattatctttctttgccattctggatgaagtgatatttctggttcatcaattaatattattgaattatttacttctaaaaacttaagtgacaatgctcttaagaacaattgcttttcacctgatgacaaaccagcaatatcaaattctttgcctaagctatttctaaatataggttttgtctcacttgtttcagataaccctaccaacttaatatctaaattcataatagaaaatatactatttatatcatcacaaactttatctataacttgacctatagttttatttctgtttttaaatatttctttattaatccttgtagctataaatgatggcacattttgagtcatattttgatctactatattttgaaagtgtggtgtaaaattcaacgtattgtccaccttattaatcttttcaaaatttatttctgttggcatatatacaactttaggatcagtagacctatcccctaatgtataagcaatctctggacttaacatcccaatttcattcttctctaacttcacagttgctgtatataatgcaggagtcagctccactttattatctcccacttcttcataatcacattcatctatttcaaatgaatcataaatgcactttaataaagtagtctttcccgaaccattttcaccgataataacaattgtatctaatattttttcattattatctttaaaatctatctctaaatcattgaatatttcatgattattaaattttattttttctaacttcatcttatatcacctctcttatcttcaaattgtttttcatatgatgttactatctaacatttccccttaggtctcccacttatttggaattatttaacttaatttaattcctcaaattttattttttatattcatcatactcaacattctaaaaaaacactaaatattttctttcatgcaaattagtttatattttgctttgatactaacaatattatagctaaataaagacagtgtttcaatactcgcccaactttgaagttttccttcattagagtaaagctacatagattaaaacataagccacttcttaagtcatacaatatatcttccacaaatgtttataaacttcccaatctatgatacaatcaagtgtaaaattccacacaatataacataatataaatgattataaaatttaatcatatgaaaaacgaggtaataaaatgataaaaattgataacttgtcgtactcatttccaaataaggatctatatcataatatttcatttactttagaaaatgatcagcattgtgcttttataggttctagtggtagtggaaaaagtacactaatagatataatcatggatccagagaactatttgtttgatggtattctagagattgatccaaattgcaggattgggtatgtgagtcagttctgtgaggtagataacacaaaagaaacaacagttttcgaatatctatgtgaagattatattaaactgcaaaatgagataacttctatttgtagcttaatggaaacatcttctgacattgatgccctactagaaaaatatcaggaagctttagatgctcttgatgtaattggcggagatgattttgaaagcactcttagtaagaaattaaatcttgcgaatctaagtaaacttaaagattcaaagatatctgatttaagtggtggagagtttaagcttattcaagtaattaaggagatgcttaatagtccagacttaatgattatggatgaacctgatgtatttttagactttgaaaatcttaattctcttaaaaacctaataaattctcataagggaatgatgttagttattactcacaatagatatctattaaataattgtttcaataaaattattcacctagaaaatcatgagctccaagagtttgatggaagctatatagactataactttacattgcttcaaactaaaattgaacttcaagaactgtctgttgctgatgatgaagaaattgagagaaacgaacgtataatcaagagactaagagatagagctgaagttacaggagaaactgctgctggaaggtatctaaaaggtaaaatgaaattcctagaaagattagaagcacgtagaataaaaaggccttttgttgaaattaagcagccttatatccgtttaactactaacaatcaagttgaagaaaaagttgctctaaaagttaacaattatagtgctggctttgatgagatacttttagaaaatgttaattttgagattaaatctaatgataaagtagctattgttgggttaaatggtactggaaaaactactttacttagagacatatttaagaatgacaaccctgctattgaaatagattctgaaattgaagttgcatatttatcacagcttcaaggtgaaatattaaatgagtctaatacaatacttgaagaattcctagatgcaggatttaaaacttatgatgatgttgaaacttacatctcaaactatgattttgaggaagaaagaatcaaccaaaaaataaaagatttatctggtggtgaaaagaatatacttcaattagctaaaatttctgcaagcaaagcaaatatgctgcttttagatgagccaacaagccatttagatatatattcacaaatggcccttgaagaagccatagaaaaatacaatggtgctattttaatgatatctcatgattactattccataataaattgcgtagattatgttttactcattgaagataaaacaatcagaaaaatgaatatgagaaaatttagaaagatgatttatgcaaaatactttgataaagactatttagaaattgaacaaaagaaaagagatttagaaatgaaaatagccatatccctaaggaacacagattttgaacgtgcaaaagccttatctgaagagttagaagcactgattaaattgctttaagtatgataaaaatggtatctaactaacatatattcttctttaaaggggcagattaactacatataatcaaattaattttaaatatcataaaagaggtgtactatgatagcggaaaaaaagctcgcagaaaaacgattaacagaagcttataagaatgctaaaattgaatattttgataacaactctaaatacatatttttcagtgattgccatagaggtgatggtacaccctctgatgaatttgcaaaaaatcaaaatatatttttattcgcattagaattctattttaatagtggatatacttatgtggaagttggagatggagatgaactttgggaacactctaactttaaacatataagacttgcacatgatgaagtatatgctctattaaaaaagttctttgattctgatagattgattatgttatatggtaatcacaatgtacatttaaaatatagcaattttgtagaaaagaattattataaattctacgatgaatataatgaagaagaaatagagttgtttcctggaattacaccatatgaggcagtggtatttaaacataaaaacacaggacaggaaatactaactgttcatggtcatcaaggagacagaatgaatgataatttgtggcgctttaatatgcttacagtaagatatttttggaaatttcttcattcaatagggttcataaatcctgcaagccctgtaaagagttctgaaaaaattcataaaatcgagcgtatttatagtcattggattaaaatgaacaaaaccatgatcatctgcggacatactcatagaccccactttccaaaagtcaaagaattaccttactttaatgatggatcatgtgttagggcaagtggaatccaaggaattgaaatagtagatggaaaaataatgcttattgaatggagaatcagaactgattcagagggtattcttcatataaaaagaaaaatattaagaggtccagagcaaattgaaaaatttgacctaagaaataataaaacaagtatgaaataagctataatatcagcaaattcttctaagaaatattatttattaaagctgagactttctaaatatatattgcaattcacaatgcacattccacaattcacaattgcggctaaaattctttcaatatttttagaattatgattaagaattatttttgcaatatatatatgaaaatctcagcttataaaattactaatttactacttactgtttaatcttgggaattccctacaattttattataattagttttataattttctcactattatactaatggcctttgagttttatcttcaaatatatctttaatagcttttttattatcattattataaagtctgtttaataataaattatagtaaggatcatttacgcctgtacaataataattaattttatatttatctacaaataatctatgcaccttatcaagtttataaatttggttttcatctatatcttttgataattcaattatgtctccatcgttcattataatagaataattaaactcataagatgagccatttttacctgttctctttgtacaatatgattgtattttattaatattttcaaatttataactcttctccttcgataaagctccacctacataaagtccatcataagttatatttatatatgaatgtaacatgctatttagtccaattattcctgttgtaatgcaaatcaaagtcaatatcacagctaactttgatatacgccttttcaaaaaacagcatccaattgttacaaagataattcctaggctgatagcgactataaagtcataccttaaagaattactaagaaaaaccaatgtatcaaattttgaaaaatctaattcagatatatgtgctacctttgttctcaatgcctcttctattatccatactatcaagataaatactccagtaagaataaaatataacagaatctcaagtgcttctagaattcttttgagttttcctttggatctcttataactttgatatttcatacttattttctccatacttcaacaatagtttatatgatagctcattacacttaaaatatcagacatctgtatataataaggcataacagctataagtttctccttaaatttttttattctatttattatttctttcatcgaatccgctctccagatttttctagtttcttatatttattataacatatatttacataagatacttaaccataagaatttctatgtttgagaaatttcaattttaaaatactactccttgtgattgagatttatatatgttttaaaatcaagtttcactaaatttcatcttgacaaatataggttatactactatattgtatagtagtataataaatggtggtgattaaattgtcttcaattaatttaataatacttggctatttgcataacaaagagaaaagtgcctatgaaatggttaaagaatttgaaatctggaatcttactaagtggttaaaaatcagtaacccgtcaatttataaaaatataattaaattgtgcgataatggatatttaaattcaagaactgttaaagaaggtgaaatgccagaaaaaacattatattcattgaatgaaaaaggaaatttatatttcaatgaactaatggaggaaagttcaaaaaatataggaaatgtttatttagagtttaatgcatttttagctaatatagagaacttaccagaagaaaaaagaaaagaatacctaaaaaacttcaaagacaaggcagaagaacgtagagcttttgcagagtcaatttataatgacacgaaacagcacaaggataaaattggttctgaacttcttatattagatctatataacgagatttatagcgttttacaaaaatggtctgaaaaagtttttgattattacaattaataatttaatgtctccaataaatcactgtcaaaaataacaaggtatcatactattattttgcatcatactaaatcagtagtattagttaatagtcaaatatgagctaagattacttctttatgttacacaaaatatatgtataatcttttacttgttattttctttctagtgcctaaatcttaatattgtgagacaattttttcgcgccactactatactttatagtagtttattatatactaatataaaaaatttttattactatttaggaggtttatcttatgaacaaaaaacatcaaaacatttcttttatagccataattttaggattttttatggcattattagatacaactgtggtaaatattactttacctagaatgactgaatactttaatacaactatggatcatatttcttgggtagtaaatgcctataatctagctactgcagttattctagtaactgcttcgagactttctgatcaatttggcagaaaaaaattgtttatttcaggagtatttctatttacgatctcttcatttctatgtggtatttcaaattctcttcaattgcttatattatttagaacacttcaaggtatagctgcagcttttgttgtgaccattgctatgcctctttctgctgaaatattcccacctgaaaagagaagaactattatggcactttggggagctttttctggtcttgctgctgcaagtggtccttcgattggtggtatagtaactcaattttttaattggagatatattttctttattaatatacctataggttgtatatgcataatattgactataaaattcataaaggaatcttatgacccaaccgcaagcaaaaacatagacttttttggaattataacaatctcaattgctatgttctgcttaactttcgcattaatgaaagctaatgaaaaaggttggacttcaagcttcatcctttccttctttgcaatttctgctatagcctttatactatttgtcattattgaactaaaagttaaagagcccatggtccctcttagtctatttaaatctataccatttacaaacggatctattactctatttttactcggtcttggtatgatgtctggtacctacttactatcttttttcctaattcagattaaaggattaaatcagctttcagcaggacttattatttcaactatgtccttaacttcaatgattttttcaatattagctactgttttgacaaaaaaattaggcagtagattaactagtgcattgggcattcttttactttgtatttcttgctacttaaatagttctcttactcaaaattcttcaaatatagattttattttaagattaattgttgctggttctggtacgggattaagtatggcaacactaataggttctgtaatggctaacgttcctttagacaaaataggaatagcttctggaataaataatatgacaagaacacttggaactgtacttggagttgccttatttttgactatatttacatcaaatatgactacccagatgtatgatgctaaagactctgctattcaaacaatacagaatgacactgtatttgatgatgaaacaaagcaacagatgattacttctatcaaaacaggtattaataaaaacgttagtctttcagaaatattaaatgcaattgatgaaaaagaagctgctgtattagcctccgctcctgctgtggataaagataaaatcaaagaaatttttgaaactcaaaagaaagaaaccaaagaaataatacctaatatacaagatacctttttgacttatactgttaaagcttttagttttacatttaaagtgagcgctataattctcttgccaggcatattgtttgcattattcagcgataaaaagagaagtcgtgatatgaaaaataagaggcttgttgaaaacataaataatgcataaataaactaataataaaaatgcgttgcgtaataatcgcaacacatttttattataatagccaatattttttcaaaaagttttgatttatagacactattaacttacttttaattttctcaaaaaagctactctctttttatttgtaaatataacatgaatacatttccaatatgaaatttatcatttagaatgttcttttatttttctaatttacaattgtgatttttacattaggtgtcccatcgaatacatattgtcctataacagtactactatgtatattcattgatgttagtttatcacaattttcaaatgcaccccctccaattcttttcacacttttaggtatatctatagatcttaaactatggcaaccggcaaaagctacattatctatatatgttacattatctggtattattatattagttaagtttccacagcctgaaaaagccccttgcccgatacttgttagaccattaggcattgtcacactagttaacttaatacaaccattaaatgttgctttctctattttttttacactttcaggtatactaattgcttttaaattgctgtcccattcaaaagcgctttctcctatacttgtcacactatttggtattgttatactctctattttagctgagctattatcagtagaaaatgctccgcttcctatacttgtaactgaaacaccatcaatttcactaggtatatttacaaccgtgttaactccgctatatcctactattgttccagttgatttatcaaatttcaaattttcacttgttgtcatcacttctttccatgctccactactatctaaatagtatccatcaatggttttatcatgttccatataacctcttgaattaaagtgataccattttccatcaatttcactccagcctgtggcccatgaatctccttctgcataccaccatcctgctaaattatgtttccattctgcatttgcacctattggatttagcattaatactgaagctactaccaaagcactagctattacttttgttaatagaattattttatcttttcttggaattcatcaaaatctttagaaataattgcaattttagtccatctctttaatatatctatattattttgttcatttatacactcaactaaattttgtggcacattccctagttcttttaaattatctaaaatagtttcttttaatccttccattttcccttctatttttccttcttcaattttctctctatctctttccaataaagtcatgaactccacctccaccgaaatatcatttttaacttcattaactcttttatgtatatttttaacaaggtttcctttagcatgctttactctatcttctgttgaatcttctatataatcaagaaattctagcaactcataacttaagtctttcatgattcctttagtatttaatagtattttttgtgtttgatcatttaagattatatcactatcttctaagcatacattttgaaaagtatatttatggcgacctttattaaacaaatcaaatgtacaaataaatattatgtagctctttgcaagtttcctataatcttcacctttacttatcaagtctaaatctatacttccttgataatatcttagtcttttaggcaaatttttatgttttcctcgttgcatctctacattataaattgtattattttcatctttaacataaacatcaagtctaatccccttgctctctagcaataaatctatggttttttgctcttcaactagttcgactttttctatttcaatttccaaaatcttttctaataattctttgcaaatttctttatcactcataacctttgcaaaaaggaaatcatcttcaagatttaattcctttaatgtcttatccatcttattaaccttaccttattcatcatcttttgttttgattattaacaacattataactaattaaacatttagtttcaatagcttctggctttggaaatcccgccccatttctcgagctagctaacacatacaattaaatttcaatttatatatgaattataataagaatcactgtaatttcaatataataattgctaattcacagtgatatttgctctaattattatattggggataattataatatctaagatattatgttattgatgctaatttagaacttaatgccttatattaataaaactgtgaatcttcataataaaattcttagttttttaatatcatattatatttcataatatttgtttcttcaaaaccttttgatacgtctcagccattatattttctgcaacatagttaacttttttcatttttaccttcttaactttttaaaaaggtaaaaagttttatttaaaccattgtttctttttaaaaatatttaatgaaaactttgaaaaaatgctcattgttaacaatgtttatttaaaatagggtttaaattttataagtttatttgaaaatacaatccatatactataaaatattttttgaggtgttattaatgaaaaaaactattaatgttgtagctgcaattataaaaaatgagaacgaagaaatattatgtgctttacgctctcctattatgaaatcgccaaatctttgggagttcccaggtggtaaaatagaagctaacgaaactccaaaagaagctattgaaagagaaatttttgaagaattaaattgtaaagtgcgatatattaatatgcataatgaaaatagacatgaatatgatgattttattgtaaatttgataactactaactgcgaattagtaaatagctatcctaaagctaatgaacatgcagctttattatggctgaaaccagaaagcctgctttctttgaagtgggctcctgcagatattcctgctgtgcttgaaataataaaaaatcatgccattatttagcatgattttttacactattagatatattaaatttaaactaattgatttgttcattaatttgaaaattttctattcagataaaaccatgtattaaaattttcactttatagataactattaagatttatttgttctttgaactcatctaatcctactctatctatgtaatctcctaatctttctctgttagttgcattttctctatatacttcaataactttttctattaaatcatataccttttcttctgatacagaaagtgctattctatctgctattcttggtctagctccaccttttccgccaacatagaacatccatccttttccgcttcctattaatcctatatctttaaatgcactatctgcacagctatgagggcaaccacttactcccatttttaatttattaggtaattcttttccatgatataagctgtccaattttgaaccaactgctactgaattttgaagacctcttttacaaaaagtagttcctggacatacttttatacttcttacacatagacctactgctgcacctgggtccatccctagatcatcccaagcattatctaaatcttcttcttttaatccaactaatgcaattctttgagctcctgtaactttaatagctgctgcattatatttttcagctacatctgcaatatttcttaaaatctctggagttacaagtccagcagttaaatgtggagcaattgcatatgtttccttatccctttgtaatattgcccctttttctaataaatcagttttcatcgcgtatctctcctaagtttaatttcaaaatataaattgtaaatattatttaataattattatccaatttattgtatcatatttctgcttttaactctacaaaaattatcattatttatgttataattcacaatgcacactttacaattcgcaattacggctaaaatttttgcaatacatatataattttaatcattattatcacaatattttctatacttaaacttatcaatatatgaatgttaaacatattctacagaaatattttcttttgttgtatgacactaatctgccttcatcactattaaatagttaacttgtagcaattttcttattatctattttctttatataccttactttatcttttgttttgattattaacaaaattatagctaaataaactcagcgtttcaatatatacctaatttccatttcattttaaaatcatactctatatttataaatgttatataaacttggttgcagcataactgctttttataaatctaaataatcttaattttagaataattgcttcttataaatgtgtgtaatttttactatttctttgatttttttgctgcttgggatgcatcaagaaatgcattagaaatccaatcaagtccttcataatctgaaacattctcgttcttaatctcatttcctatttcttcatcaatagcacacacagcaccatatattctatacccaccatttttatcaattgttttatcgttgcactttgcatctgaaaaaatcactacattttcttttgttgaaccaatatacaattgactttcaactttatctcgtaaaccttttttctgcaattctatatctgaaaatatacttttatttccaaacggttctgatgttttataatattttgtagcctgaacattatataaatcaattgttacattactatttttcttaggatctaaaattgacttttcaaaactttttacagcttctttatttttattttcgtcattttctacttttttattatctttatttatattttcatatgttttattattttgagtattattataattatatgaattcttaaatccagtagaatgccttactccaaaaagaataacaattgtaactatgatccttgccgcatatttaatattataaaccatatcccttttgcttctgctcttcatattggattcttttcctgtattagttcctttttttgattcttctataataagattatctctattaaatattatttttctaacatgttttcctgccaattgagcttctatattctttaaataattttttattattttattgttctcatcaagacataaaagcttttgaaaatactccattgccattataaaatcttcattataataataggcgcatgcaatataatttaacgctaatttatccttattattgcaagataaatacatccttaaatatggcaaagcttcactgaagcttttatatgagactaaaataatacctatacgtaatgaactgcttaaatcattattattcatttcaaaagctgatttataatattccaatgctgcttttaagtgatcaagatcgtaattataatctccctttaatcttaataattcagcatcaccttcaaataaagaattcgcattttttatatggttatacgcttctgcatgctttttatttttcagtgattgttcagcatgttctctttcatataaatactcatctgcaatttctggattaattgattttataaaatcatatctaagctcactaggttccttaagcttttttaaaacctcataaactattgactcaggatattcattatataattttatttcattttggctccaggtaaaattattgtttagctttgtccatatttctgcgggtagatatttatgttttattaaaaagttaaagagctcttcttctataatagaaaaagcttctacattccagattacagctgaatttaataattcatcccataccgctgcatcacatcttaaatgcaagtcttcatatatatcatttaatctatctaaaaactgagctatttcactgtgtaaattaaactttgcttctttaatactattatagcttttattaatatctaaatatggtttgaagtcaatttttttatcttcatttaaataactttcagatatgtactctttgtcctcaattccatccacttcattaatagtattttcatctaaaatattattaattaccttctgatttttattatttttctttgcatattttatggctgaatcatatgcttctctaagcttttgatacccttctggatcatcttctggattatagattttaagtaatcttgaatacgctttttttattgtctttatgtcactgtcataaggtatttctaatacattccaccaattcataattaataataagtctccaattcatcaaattttttagaaattaattttgcatttttttcgattagtcttaaatcttgagttgataatattctctcaaattcacttaataaacctgcaatatactcacgcttctctcccaaagcttcttcatataatctttcacctcttgcgagtataagtgtattttctgttttatctcgtggatgaatttttatatctttaagtgctaacatacgttctttaatttcttcgttcgtcattgctcctggagatttttcaattattaatgtttcttttctttctgtacttaatatagtagcttctacttccaataatccatttatgtcatatgtatatcttaatgcaactccctgcattccagctttgtcttttgggactactattccaagttctccaagaaatatattattttctactcttctgctttccccttggtataccttaatagcaattttagtttgattatcacttatagttgataactgttcaaccttacttattggcactggagaatttctttcaattataggtagaaagtaccctgcttcatactttttgccttctatacgatttgctacttctaccccaagcgtataaggacatacatctgttaatattaattccttgagatctgaacttctttcctttaaagccccctgtatacatgctccaagagctactgattcatctggatttatatttgaatatggaagtttattaaacattttactaactacatttctaactaatggcattcttgtacttccacctattaaaattactgcttcaatttctgaagcatgtatttctgcatcccttaatgccctttctacaggatgtcgcaatctcattattaagtctgctgccaatttttcgaatttaattctatccaatgctatttcaaatgttttttcatctacacgtaaaatcatagccgcattatctttaacagataattctcttttacatagttcagcttgtttatataaagcggatacttctttattatttaattcttttaaattcagtttatttgtctctataaaatattctacaagaaccttattgaaatcctctccacctaaaaaattatctcctgctatagatttaacctccataaccccttcaaatagttcaagtattgatatatcaaaagttcctccacctaagtcaaacactaaaaattgtgtttcatcatcttcttgatgaagcccatacgcaatagctgctgccgttggttcacttattaatctttcaaccttaagacctgcaagctcaccagctctttttgttgctttacgctgagcatcattgaaataagctggaacacttataactgcctctataacttcttcccctaagtagctttccgcatcttccttcaatctttttagtatgaatgaagacaattcttctggtgtaaatgtataagtaccaagcttaaacttcctatctgctcccataaatcttttaaaattagctattgtatattctgggtgtgtaatttgtctctctttagctacatctccaactaaaatttcattattttcatcaacactaattactgaaggtgttaaattcttattcaaaatatttggtataatcttagcttgtccttcttcccaaacagcaaccaagctatttgtagttcctaaatctatccctataatagacatatacttccctccatattcattattcttaaacttgtaaagaaaacattaactctctttttcaaatgttactcttgcccatcatctataacatttaaatatttcctttttagtatccttattaattattaaattgttattatacaaaaagtatttcgcaatatttttttccaataaaactcattttatctgtataatggaatacctttaaattatataatataatttattactaatccatccaattattgatgctttgttcaaatttcattattatgcaatatttgttcaaaaaatacaaaacctattataaaataagctatatttttcttaattgtttcattcatagatgcaataatttcaaaacatcaatatattggctttcatacagtattccaagtaaatatgtagtaattaataaattatattattcaagccaagatatcgattgacaaatttaattttattcaatataatttattcatattgaatgttgtataaagattaataatagtggaggaaaagattatgaaaattttagcattggaattttataaaaatggaagaatgaaagaatcctttgcatttggaggatcacttgaaaaagaaaaaattaatataaacaaagattatcctgcaagcctgcaaaattatttaatagatactggaaaagaggttattctagtagacacaggtttaccagttgagactcctgattttgaagataaacctgatcaagccttatatatgggtgaaaaaattgctaattttaaggaagcactaaaaaatgtaggttatgctccagaagatattagcaaagtagttttaactcataaacatccagatcatgctggtgaacttagaatgtttgaccatgcaaagatttatatatcaaaaatagagcttgaggctatgagtattgcaggcgccaatttagttgaagttaattttactgatgggcagtataaaaactttgataaaagccaaattataagtgaaaatatttatatgttgccagcttatggacatactactggaaattcattaattgttgtttatgataacggtattcactacatgattcatggtgatgttacttacacagacgaagctttaaggcaaaaccaattatctgttgtctttgaagataaaggacaagcaattgaaacattaaataaagtcagaacttttataaaagaaaatgatacagtttatttatcaactcatactccagaaggtgtaacttcacttaaaaataacactataatgaaattgtaataaatcgtaaaattgaaaggattgaataaaatgaataatacaatagaaaatataaaaaatcatagatcaattagacaatatttagataaggatgtttcaaatgaaatcatagatgaaataataaaagctgcccaagccatgcctaattcaataaatggtcagcaaacaactgtcatagctataagagataaagcaaaaaaagaaaaacttgcagaacttgttggaaaccaagaatatgtagctaaagctcctgttttcttagttttcgtaatggatttttatagaacttacttagctggagaaaaaactggttctaagcaaataatacatgaagacattgaaagtgctctagttggtgctgtagatagtggaattactttaggtgcagcaataattgcagctgaatctctaggccttggaactgttccaattggtggaataagaaaaaatccagaagaagttatagaactcttggatttgcctaaatatacattcccacttgtaggccttgcaattggatatccttcagatgaatcacaccaaaagccaagaattccttttgaaagctttagacacaatgatacttataacaaagaagctatagaaaattctattgatagctacgatgaagaaatggaagcttacttaaaagacatcggtagatatgataaagaaaaaaattggagtactttaacttcaagtgtttatcaaaatatatactatccaaaagtaaaggatgcaatgaagaaacaaggatttacccctgaaaaataaatctctataaattttatgtttttaaattagctgtttagatgatagtttttttcatatatatttccctaataaataaagagtaccaatcatattccccttatgattggtactttctttgaattttcaaagttgctttgtagcttaatgcttaataagtcttccccctattttcataagtattaactcattcatcatatttagctccattattaccatcaattaaatttaaacttttagaagatacttcaattatacgattcactttatattaacactaaaaaataatttactataataatttttactaagactactttttacattactcaaacgagctccccatatcatccagttattcaaatcttaattattaatatttcttccttattttgttttgattatttttcagaaaaattttaaaagaaggaatattcaaaatatttagaatatgatataataagataaaaatatatagaggtggtatgctttatggcgaaatatggagatcatgaaataatcgtaatacagaataatgaaagtcaatacccatataaggcaattgcaaaaataggtgataatgagataaagcataagggacagagtaagtctgaagcaattgatttagttaagcaaagcattaataagttaaaatctaaaaatataatttaactgtagtttaagttatttcagatgaatgaaaaccattacgcttgaaatattaggtatgaaaactacatataaccctcgacttatgtcgggggtttttaccttagaaatagaaaagttaccatgttacagattatattaaaacgtcagcaggtaaaatattatttccaaattcataagaatacattgtttattcttatatatcaactttacttacggtacgaagcctacctttgataggtgttttttgtaactgctggaacacccactctcctttattatttaatatttctacaaaggtagatatatcaactatattgatgattcctatatcgtcttttgtcatgccttcaatattacaaagcgtgcctacaatatcaactgccctcatctttgttttcttacctgcattaatatgtaatttcataatctctttacttagcttcgcaccctttgtttctttaatttcatgtcttgtattcatttttaaataaaattcgtctctgaaattatttacagtttccactttaggtctttccttcaaaagaatttctttaccgatatattcatgtatatcatttacaaacttactttcattttgtgttacaaaagtaattgctctccccatccttcctgcacgtccagttcttcctatcctatgaacataactttccttgtcttctggtatatcataattaattacatgggtgatattatctatatctatccctctagctgcaacatctgtggctattaaatatctaaaataacccagcttaaaattattcattactcttaatctatcactttgttccattccgccatgtatttttctgcaatcatactggagctttgccaattctttataaacttcatctaccttttgttttgtattgcagaatatcatacaactatctggattttctaatatagttatatctcttaagagatctattttatgtgattcatttacgttatatctttcttgacatatattatctacagatttattttgctcctctatttcaatatgtataggctctttcatatatttattgcataaagtctctatgtcttttggcattgtggctgacaataacatggtcacacgttcttttggtatactttttattattgtttctatttgctctacaaatcccatattaagcatttcatcagcttcatctattataagatactttatttttgatgtatcaaatgtacctttttctatatgatctataatacgaccaggtgtcccaactactatatgtgttttttgtttaagttccttttcttgatcatagaaaggtgacttcccataaattgcagctgctttaattcttttaaatctacctatattaaaaaaatcctctttgacttggatagcaagttctcttgttggtgtaatcactaatgcttgaggtttattttcttcccaatccactaattggcaaataggaatagcatacgatgcagtcttaccacttccagttttagactttactactatatccttttcttctaacgcaatcggtataacctgttcttgaacttttgttaactccttgaagtttaacatgctaattgcttttaataactcattgcataacttataatcattaaaatttgcttttatcatttgatcatctcttttctatattttcagtattattgctacaaacatacctttttatacaatatttcctctttatcattacaatccatataacaatatccatactaacctttttattatatcatacccatgtatttcatttgcaatcaatgaagaacttccttttctttactcttattttagcaacttcttcaatacttaatccttctaattgtagaatttaatatttttataattccccgtttaatattcgatatattgctttagctactccaaaatttacatttgtatctgtaatatatttagctacttcttttatttcatcaactgcattacccattgcaaaagaattttcaaattctttaaacatagaataatcatttaagccatctccaagcactactacctcatctttttttatattcaatttttgtgctacttttgcaagaatttttcccttctcagcatccatatgatttacttcaatgttagttccaaaacttgctgatacagctagtccttctaatgcttccatctttttacgaagcttatttataatttcttctgattgcgcaaaagatacaaactttcctatattattgtgtctatttaaaaactcattcatatcagtaatatattgcatatttttaaaatgcggattattattagcatattttaatatctcttcttcatcttttaattctggatggaatgtaagagatctttttaccattccagctaaagtttcttcttttgtatttgttgtataaaatccatcatctgtgtatatttctatagccagatcgttacatttcattacctctaaaatttctattgctcgtttttgttcgatataagtatgttcaactatatctccattaatatctctatattctgctccatttagtacaacacaatcacattgtaagtcatatttatgtataaacggctctacatcagaatatgctcttcctgttgcaattgcaaacttaattccatttttttgtgcagccttaattgcttctatattttcttttggtatatcgtgatttttcccaatcaatgttccatccatatctgctgctattaacttaatcatttatcttcttcttccttttctataatttttatctcatggcttttagtttttctcttgttttgcttcaactctaaaatttttatctgagtaaaaaactataagtacaaaaattgcacatgtaatccaaataagtggttctgatatacatactcctaaataacccattgatggagctaaaaatcctacaactgcaaatttcccaaaaagttcaattgaactagaaacaagtggagtaaatttctttccgattccctgaagcgtacttctatatataagaagtgtggctaatacataataaaaaggagtattaattcttaaatattttactgctgtatctataattaaagtatcatttgatccagttaaaaattttattatatatgttccaaaggcaaaggcagttataataactattgttgaccatattgcacccatgataactgtttttttaagtccaatatttatccgttcatatttctttgccccataattttgacttacaaacgtggctgatgctgttgccaatgttccaagtggcatcatgtaaatttcactaacttttcttgccgccatatgtgcagttattatttccttaccaaagctgtttattgcaccttgaagtgcaactgaaccaattgaaacaagtgatagcataaatcccatagacaatcctgaagtaattaattccattaccatagtaccatcatatttaaaatctcctttggataattttagctccggacatttttttataatatgattaaatcctaagattacagctacaatctgtgatatgacagttgcataagcagaacctctaacaccccatttaaatactaaaataaatgtacaaaccaacactacatttagaattgaagcataaattaaatatataagtggactacggctatcgcccaatgctcttagaacccctgctatcatattgtacattatggtaacaatcataaacattaaaataattacaatatatccatatgcatcgtttattatttcttctggagtatttaaaaatttaagaagatacattattgtacctactccaacagccgtaaatactattgatattataaggtcaagaattactgtcattgccacagcctgtctcatgttatgcatctcttttgctccaaaatatcttgcaatcacaatagcaaatccattatttataccaaccgccatgccaacaataagtccaaatagtggggttgtagcccctatagctgctaaggcattttctcctagggtatgtccaacaatcactgtgtctgccaaattgtacatttgttgaaacacactcccaagaaatataggtaatgcaaaataaaaaatttgtttaccaggatttcctgttgttaaatccgtgattttatttttttccattgtagttttttcctctccatcttgctttctatgtaatttaaacattccatcaaaatcttttttaattttactatatcacaatataataaaaacttatattatccgagaatttaggaacaaaaaatactttttaggtatttattttttttagaaacatattgttttttctatatcgtccttagcaaaaaagtactgcacgaaatatataaattagtgcaatgcttgcatatggaaaaccttgtttcccccaggcgttcttctgaagtcggaagggctgaagttgctaaagaatatataacttgttctaaagaacatagcataaactttataaaattatgaaagctaagattttccaaatataagaaaatcttagcttataaatatttctttactagattctagtaccttaactgctatataatttcaattcttttaagttgatagttacacctaattttaataatacatcaagtacgagtaaaccatttatatgtccttcttcatcaattaatccaaaatctatatttacatcttctagacaatttcttcctatattaactgaattaatatttttcctataagaataatgctcgccaccaacaccatacattgtgataaattcatcgtctgcttccgctttaatccctaattcatatacactatctggattaataatagtatgtgcagcacctgtatctacaactacattattaattaatacattattgcccttatatccaatattcatatcaacaaataacaaaccatttttatattctaagttcatctaattgcgcctcttagtactggcatttgaactatattcattgataattcttcttttgatgtatgaaatacaaaattatcgcctttacatctaattaatatattgcttgcttcttcatcatccaaaactctcactacagctacatcatctatacactttttgttctcttcaatatgagcctctaagctttttaaaagcacaaatttattagggtatatagttcttacttcttcccacttcatattctcacatccaaatatttataataagtttataaatgagtcattttttctatccatatttctacctccattatatcataaatctaggtttgatcactcatatgtctatattataattatttccagtatcaaacaagatatacgtacatatgttcttggcggataaaaaaattaccagcctcttttaaggcactccttaatctaccagactttaattatttagattatctttccacatttctcaatttttttatttttcgtatcatgtatatataaaataaaactacacatattaatatcataaggaacataacggttgagcaaagatttatatatgctcttgatataagggtgaatataagtcgaacaaagattttataatggttataacatatagctgttatattagtcggcgataagattttatctggtggggaaaagttttattatagttgatttatatctattataatagtactccaacttattatttaaggtcgagttaacattattcaatgtgttgaattgatttaatacagccgtgaggttatattaagttgaataaatatgttgtgtggtggagcgaaacatggtaattggttgtgatttgttgtattatagtcgaaagattataatatgatgataagctatctattattgtgctagtgaagattgttatgctctttaaaaaaccgtatttagtatatatctatgctagatgcggtttttttaatcttgattgtaccaattaaggcactattaagaaaatactaagttaattcattagcatattgggatgtgttattttcttttatgtactaaaatatatttttaaatttttagtaattcataatttcaaaagttaaaaataaacatctgaaaattctattcttatacgttcatccttatttttaatatttctatcatatatcatattttccttagctactgctccagctggaagcatcacagtaaacttgcttccttttccatattcactttcaacatttatactaccaccatgtaatagaacaatagatttaactagactcaatccaataccagtaccttccgcatttctagataaagatttatctgcttgttcaaatctatcaaatataatatccaattttttctcttcaataccaatcccattatcctctactgatatttcaacccattcatccatatccttaacatttacaaatatttcaccattatcatttgaaaattttgtagcattcgaaataaggtttagcattattctctcgattttttctggatcacacgcaataatcttttcttctgtatccgtgtcaaaaataatatttaagcctttaattttaacaaaacttgttactgacataactatttcttctacgacattaactatattcacatttactaagttaaggtcaaaaaatcctgcttctatttttgatgagtccactatattgttaataagctttgataatctataggtatttagttttattgatttaaaatatttaataagtatatcctttttatttattattgaatcatccatataatacatttctaataactgagatgttgccgaaattacatttaatggagttttaagttcatgagatatattaactaataactcttcctgtgattttaatgtcttttccatgattttattcgcgtttatttcagcagtaacatccatttctaatactttgttttgttcttctagcgttttttctaaactttttctttctgtaatgtccctgctaaatccagatacagataccaaatcccccttttcattatacgtaggaattaaataatcctctatccagacataatgtccatctttatgcttaaatcttaaacaaaagtctttggaaaaatccgtgtttttatccactctagattgcataatattggtatcctcaggatgaacgatttcgaatacaaaatgagggtcagtatagtacatttctagttcataccctaaagtatcttgcatcgaagagttgacatatataaacttaaattccggtagaatctgaaatacaaaaaaaacgtccttagttttttcacatgttttaattagttgattgtatctctcttcaatgtgaatatatttgcttatatcaataagagacaaatatgtcccaactattttagaatcatcattaaaaacaggtttggagacaacctcaaaaagtaactggttgccatctttttttagaactaaggcttcgaaactttcacgtgataataactcatcaaatctataacctaaaaatttatcaatattagtatttagaatttcactttccataaatcctaaaattctatagcaatttttagaaataaatttaataactcccttagtatctactttaataagtaactctctacttatttcgcaattatctgaatcaacatttaagttcatttttctattctcctgacaatatatgtatactaaattcaaaagcaagtattaaacattaagatgcttaatttggatacccttcatatatttacataatttctcaccaaaaataattataacatacaatcacaaagacatcttaattttttgtttttactttgattacagatgaaaatttttacacaaatatatttagcagttataagtatataatttatgaacatcagaagttgtagtcgagagtttacgaacgacttgctaataactttaatatctaaattaaaaaagagccttgttacaggctcaatattaatacttactttattacttatttgagtttttttcatagagatataacctaaactttaaacttagacatttcagtttttaacttttctgcactttcttttgtttgtgtaacttgctctaatacttcattggatttatgactaatttctacaaccttatttgctatatctaccgttccacttgctccttcgcttgttgcttctgctaccccatctatagtttttaaaatatcattaattgatgctaaaagttcttctgatgttgaactaaagtccataacaaggtcatctacaaattttgcatcttcactatactttcctgctacttcaagcatgttactataatctctctttacatctttagacacaaactctaaaagattatttgaattatatgaaagatcgttaacagcttctctaaccttattggttattttctgtatttctgatacagtatcttttgactgttctgcaagttttcttacctcttctgcaactacagaaaatccacgccctgcttctccagctcttgctgcttctatcgctgcatttaatgccaataggtttgtttgttctgttatctgcataattgaatcagatagtacattaatttcttcaactacttttgacttttctaaagctttttcaagttcatcttttgtattcacaaatgtgttatgagctgtcttttgagcattttcaatattttctttagtttgttgtgctcttttatttatttctcctgcttgaatcgctccctcttgtgatttttcagctattaattgtactgccttacctatttcttgagaagttgctgaagtttcttctgctgaagctgaagtttcctcaatagttgctgaaagttcctgcgtagttgctgaaacatcctctatatttccattaagaattttcacttcattatttactgttttaacaacctcttcaattttatctgattcttctacaatatttttaattaatgatttcaggcttccatttatattatctaacgcttttgccattgttcctatttcatcttttctctttttcaattctacaggtacttcactcgtaaaatctccacttgatagtatgtccaaataattaactgaaatatctaaaggtttaactatattttttgtgataatcttagacatcaaatatcccactataatagaaacagctatagatataacaaaaaatattgttatctttttataattcttattgtttaaatcattaatctcatctgctgcttttatattatgttgcgccaaatcttttaaatttacttgaaaattattcgccacatttttaatatcttcattcttttctaacgcttccttttgctttcccgctaaagcaagttttaatacttcatcccttccttccctatattttgacaaatcgttttctatagttgtaatcatattttcttcatacgtatctaactccacttttttatatttttgaaagttatcatcaaacatctgctttcttttctcaatgtcattcattttttcattttgcttgtctttatcatctggatataatattatgtaatacatatctgcttcaattgcccttgcctgatttctattatcattcaaccagttaattgcatttaatttattattatacattgattccatattatcattgcttatttttagttcaatgtaaccaaaaataccaacaaatactgtaaaaatcaatagtattgaacttaataattgtaatttactttttattttgatattacttaatttcaaaataaaatcacctccaaattcattttcactatttttttataccattactctctgcaaaaatattgttgcactgttttattgccaaattcgacataaaaatgtatattgctatattatcattatatatttaatatatttctttattaaattatatttcataataaataagcatcatattgtttaaaaactactttaaatcaaatcaccccgaatctattctattccataatactaataaaaaaataatcttataaaaatttgacaataatctcgcactttaaacttattttcccataatattcttttgtttataattataacacattttttctaattttatattagaatttaatataaaacaaaaaaagcttaaagttaattatttttcactttaaacttttgatttattagattattttaatgtttaaaatccattcttttaacaaagactataaaatataattattgcaaaaggaggaatttttcatggctaaagttactggcgtagttaaatggtttgatacagaaagaggctatggttttatggcccctctagtaggcattttgaaagttaaatgtattatttgaatcttcagatgctattactattcgatttctaccttgatttttagctttataaagagcaatgtctgctgatttaaacgaagtatcaaaggatttggaaaaattatcttttaataaagaaattccaaagcttgcggttatttgtatttgaaatttatccgttacaaatactttattctgaatttcctgtctaatattttcagctaatacataggattcattaattgaagtttcaaaaagaaatataaggaattcttcaccaccccagcgagtagctaaatccgtagtagtttttatatgttttgttataatattacttatttctttaagtaccatatctccaactgaatgaccaaatttatcatttacatgtttaaaatgatccacatctatcaaaataagagttgcgatttttttagatttaccaatcattctcattttttcagaaacatgattattaaaactcctgcgatttaagagttctgtcaatgaatcatgacttgatatgtagtttaattttgtattaatctctcttagtattatgttttgagctattttctcataattagaattataaactcctgttgaaattataataattgctaaaaagaaaataaaaccatttataatgttagtaactaacaaattaatatcattctgaaatattaccaatccacttaaataagctaagaatggaatagaatacacggctaaatttaagggagctctcaacattataatactactaaatataataaggttagcaataaatacactacttacattcccgggtttagcttgatctaaagcactaatcatagccatagagcttaaaattaatatagttaaagttggaattaataacttattcataattctaaatttatttttactatatttagtcaatagttttataagaataattccaataaaagaaacaatcacattaagtgaatgtaaaataaaatatttactatcattccaaattacatatgaagaatggtttattaagtaaggaatatcattaaataatatgaataaaatttcgactattataaatataataagaattaacttcattctttcaagattagttacattaatatcattgataacagtagccttttgattctctgtaaggtttaaatctagctttttcaaaaaaaataatttattcatgggataattctcctaatagattttaagataattataaagtatttttcgatatatttttataaataattacttataataacattttaccacaaaaaagacaaatacaacatattaatccaagacacatgagaccatagtcccatttgtgaatcctcatgttctcacatgcaatatgcttgtataaatttttgatctatgcctgtttcatctgataataatcttctcataaaatgttctgatccttttattgatgtcgattcagtgcaaaataataaagctgagattttctaaatataagaaaatctcagcctataaatatgatctttataactctgtgtacttcttgctgttacctttagctttttctactggatatttttcttcgtttttatccattttgctatttataatttcctctaaatctactcctaatgaatcagccatatgtatacaataaaccataacatcagccagctcttctaaaacatgtcctttattatagttttcttcatcccatagaaattcttctagaagctctcctgcttctattgatatagctttagatagattggctggagtgtggaattgactccaatctctgtcatttcggaattttcttattctatttattgtttctttcatattattcactctttctatgcttttccagtttttatgtttattatagcatatattacacaaaatgaatttcataaaaatctctaagtattatatagtcatattattttttaacctttatattattttgtgttgaacacagctctgagaaaataattcttaaccccgaaaaatacccttgaggtgtaaaaaatgaagaaaagaataaatattgtagctgcaattataaaaaatgaaaacaaagaaatattatgtgctttatgctctcctgttatgaattcaccaaatcttttggagttcccaggtgctaaaatcgcttataaccaaactccaaaagaatctattgaaatttaattattctcttgccttttttgttaatttgtagtatatttgcaacatgatgtttaaaaaataattttttaaggaggttgaactatgaatacatttatattatttattacttttataaaattaaatacatgtacttattcatctgtgaaacctcgcgaaagaaccgctatgtgatatctattattaacttttagcgtttaacttttatattattttgcgttgaacacagctctgaatagctgtgtctttttgcgtttaaaagtttataaagttgcttcttttaacttagggcacatttaaaacttgttatttatcttcatgcacctaattaaaaactttataaatttaaaattttaaacatcataaaatatctaggcatattaaaccatcagattattaaaatcatatgccaaaaaggaggaaattttatgaccttatttaaaaattacattgcgaagcaatggaaattactacttttgcctatgtttgctatgatagtttccatctgtgcagatagctcttatccttactttcaaaagatatttattgataatataattcttggtcatatggataattatttaattatatttttaatagttgttgtttcagttgcgctaattcatggtttattttcttacttaaatgagtttttgttcgataaatttgctcttatagtgtgtaaaaaattgagacaagatttatactctaaatttcaatcttttgaattctctttttttgataataataacactggtgaattactttcaagaattattgaagatgtagatgtagtatgggacacgctatcctttggacttagattgctattggaagcaataatacttttttcagtttctgcttttataatgtttaatataaataaaactttaactattatctgcttacttgttttattacccgttgcttatattggaacaattatggacaagaagttctggactgtatattcacaaattagtgaccaaacagccgaaataaactctatagttcagcaagatgtttctggtatcagacttgtaaaagcttttgctcgtgaaaaatatgaaatatcaaaatttttgaaagtaaacaaaaaattctttgatttaaatgttgagcaagcaaaaatagttgggacttatggtcctataattgaacttttaacaaacgctgcaccaattttaatgattgtttatggtggttatttatgtattcaaggaaatttaagttttggtagtttagtagcatttactagttatatttttaatctttcttggtgtgtaaagaatttaggtttttttattaacttactttcacaaaataaagcttctatgggtaagataactgatattttagatagaaattctgaaattacttccaaggaaaatggttataaccctactgaagttaaaggagatattatatttaaaaatgtaagcttttcttataacaatgttgaagtacttcatgatataaatttaaatattcctcacggaagtactgttgcaataatgggtacaactggatgtggcaaaagtaccttactttctctaataggcaggtattacgatgtgactaaaggagaaattttagttgataatgttaatgttaagaactggaacttagaaactttaagagctaatatgtctgttgtatttcaagatactttcttattttcagatacaataaaaaacaatatagactttggaagtaataaatctgaaagtgctttaattaaagctgttaaagatagtgctgcttactcctttattaaagaaatgccagaagtttttgataccattattggcgaaagaggtcttggcctatcaggaggacaaaaacaaagacttgctatatcaagggcaatattaagaaaatcacctattttaattctagatgattcaacttctgcccttgatatggaaactgaatttaaagttcttcaaaatctaaaaaatgataagaaaaaagcaactacttttataattgcccataggatatctggtgtaaaagacgctgatataattctatttatgaaagatggtcgaattgtagaaaaaggtgatcattcaagtttagtaaaagctaaaggttactatcatagtgtatattctcaccaatttcaggattttgaagcacttacattggaggcgaattaatatgaatgatattttacatgaatcatcaaagattcaaatagtaaaaagactattaacctatgttaaaccttataaactgaaagttactcttgtaattttacttttacttattgtaatggcttgtaattcagttaccccttatttaatgaaaatatctatagatacttttgttgcagaaaagaatgttaaggccttatttcttcttggatgtggattaatacttatgaatatattttcaatgattttatctggaatcagaactatcgccatgtctaagattaccaatcaaatcttagtggatattaggcatagcttatatactcatatacaaactttaagctttaacttttttgataatagacccgttggaaagattatttcgagagttgttggagatgtaaatgctcttcaaaatttattaaataatagtattgtaaatttaattcctaatgtttttactattatccttgtaatttgtctaatgcttatattaaatccaatgctggctggtatctgcttaattacaatgcctttattattatttgcaatgttctacattcagattaaggcagataataaatggaaaatctttagagaacatcgttcttctttaattggatacactcatgaatccttatcaggaatgaaggtaattcaaggttttagcagaaaatattacgctaaagataaatttgacagccatattggaaatcatgcaaaaggttttatgactgctgtatttactcaagatttcttttggccatttttgactgccttccgtggtttaagtatggtaattctactcggctctggatatctgttaagcaaacaagggaatttaagcttaggtactttaatggcattttttatgtacattgaaatgctttggagacctataataaatctctcatcattttataatgcctttgttaccagtatgtctgctggagaaagaatttttgatattttagataccaaaagcgatattgtagatgaagcatcaattaaggatctccctcaaattaaaggagatatcgaatttgatcatgttactttttcctatactaatgctgatattccagccctaaaaaatacttcttttaaattaaaagctggcgaaaaaatagccttagttggtgaaactggtgcaggaaaaacaaccataactaatttaattagcagattttatgaccctacctttggctgtgtaagaattgatggtgtagatataaaagacgtcactgttgaaagcttaagaagccaaatgggtataatgcttcaggattcatttttattttcaacctcaattaaagaaaatatacgctatggtaaattaaacgctacagatgaagaggtaatacaagctgcaaaggcagttaatgctcatgggtttattgaaaaactagaaaagggatatgatactgatgtaaatgaaagaggttcaagactttcccttggccagagacaattaatagcttttgcaagagctttaattgcagatccaagaatactaatactagatgaagcaactgcaaatatagatactgaaactgaattattagttcaagaaggtataaaaaagcttatggaaggaaggacctcaatagtaatagctcatagactttccacaataagagattgtgataagatttttgtactttctaaaggcagaatagttgagtcaggtactcatgatgaactccttaaaaatcatggttattattataaactgtattcagctcaatacagcttcctaaagcaggatgcttaaaaaacttcatgccatctaaagactgattaaaaaagataaaagaacaaagtggctgcgccacgctctttcttgataccaccttttacaagccaatatccttataaccattggtatcactgactttcaaaatcaaaaaattctatactttcctagacaaaaataaaaggaattgcttgaaattagcaattccttcctagaaacaatttataaaatatttctttatcataaaataattaaagctaagatttcctaagttcagaaaatcttagcttatttttttatactttaaattttaatttttaatatttcttctttactgagttttgaatatttaattattttctctattggctcattatctttcagcatctctaatgctatctctaatgccttctttttttcaccttcttctctgcccttttctattccttcttctattttctctctatctctttccaataaagtcataaattccacctccactgaaatatcacttttaacttccttcactcttctatgtatattcttaacaagatttcctttagcatgctttactttataatctgttgaatcttctacataagcaaggaattctaatagctcatcacttaaatcattcataattcctttggaatttaatattattttctgagcttcatcgtttaacattatactattatcttctaagcacatattttgaaaagtatatttatgacgtcctttatcaaataaatcaaatgtgcagataaatataatataactttttgctagttttctataatcttcgcctttacttattaggtctaagtcgatgtttccttgataatatcgtagtcttttaggcaaattcttatgctttccacgttgcatttcaacattgtaaattgtattattttcatctttaacatagacatcaagtctaatgcctttactttcaagtaataaatctatagttttctgttcctcaaccatttcaactttttctatttcaatctctaaaatcttctctaataattccttacagatttctttatcgctcataacttttgcgaatagaaaatcatcttcaaggtttaactcttttaaagttttattcatcttagtaaccttaccttatcttttatcttttgttctgattattaacaacattatagctgattaaacatcgtgtttcaatagcgctctaacttcctagtattattatactttataattctaagtataacataggatttgcaatgattattttccttaaacaaggactccctgtctttctaaaaattctttatccttagtactatagttttctttcataaactgctgaaatcttaataaaacatgttccatgttaagagtattatcttccattataaagttatctttaaaattgtatctagacattgttatagtatctgctttggatatcatgtaattgtaaataacttctttaaaaatttgattcgatacagctatattattgtttttatcttttattaaatatccaaacatatgtcctaaatctataataggattatttatattatatgatattggaaacccacaaattaatatgttatataagcactcatataactttaaattattttcaagattcttgattagatcatcaaataaagtatttttatcttcaagtaatatttttaccgctctttgtatgtctgaagctgtccattctcttttattttttgctaataaatcctcatcaacaatttgacatatccttgataccaagaatggatatccagacgtaaatttgtatatttctttgcttaatacacctatatctaataataaatcattctcattagcataactctttagcatagtgctgatatctgattcattaaaactcatatctacgttaaaattaactgctatattccatggtgaattatatcttatctcagaatcatctctaacttttattttcaaatttttaatatcatatactcctgccaatataacagatttaaatgtcgttgaaagctcttgctccctacttaagtataaagatctaagcattccaagaaagcttaaaaataatctattattagaatttttatcgacctcatctataataagtacaacatcattatcttttgtaaaatccattattgcataagataattccgtgaaggtcgaagccttttttatatcgacatttacaaatctaatcatatagttaatgaatgtattgcaaaatctctcctcagacacaaagtcttctcctataagctcaaagtccattcttattactttatatttattatttagccttttatatagctcatttaaagttgttgtctttccaaactgcctaggtctatttataacaaagtagaattcatcatctacaagcttttctatttcatttatctttcctgatatatctaccatataatgctttttaggtacacatacgcctgttgtattaaacctttttgtcatagcttcactctccatctttaaatagtatgctgctctgcaaaaattactaataactaatttaatttgttattaccatttcaatacttacattatacctttaatttatctctgtttactagcactttctaaatgtttcaaattatcttttattaaaaaattatttcctgctctaattttttattcaatttaattattgtagatagaacgtctgtatagtccttatattcttcactttctaacaatctattaatctcatttacatcattagttgtaagttccttagcataattaatattttcacgtaaggtttcaatatccatgtttagagttttaaatggtatttttgtctttcttcttaaatgaactaaaattttaaaacccccggcatcaatatcaccagaatgataataatttatatgaggattttcagaataaattttaattaataacttttgtctaacactattatgatacccacctaaataaattacacctccatctccagtataattattaaatgatgttaaattttcaattgtcaccagcttacttcctgaaactttaatttctttaatattttctatatcctttgaacttacagctatacctccaagaaaatcatttgcatttattttactttctttaagcctcaagcttatatctcctttaaaataaacataggtataattcttcaaaatgttataatcattaagaacttcatcactagaaaagtcttttataatcttaattattttgccctctatagcttcatacctttttgaatccccataaactttgacggaaaaatttcttctaaaaatttctttatcttgctttagcacttcatctataccttttaatatatccttacattccgatacattatcaatatctaaatatttttttacagatccattactcttaagtttatctgtaatatatgttgcaaagttcccaagagcatcttccctttctttataactttccaataatgtagaaacttcatcttctttttgctttttttctttcctattgagatataaatatgctgcttctatattctcaagatttaattgaatcttttctataatatggcttttgtatccttttcctttatatacttttataagtttttcaatttctaactgattacaagctacatcaatttcttctttatatttgtaatttagttcatcaaaatattcctttatacttttcaaattaaatttcaagtatatctgtgtatctcttaacgcatcgcccttataaatgacactgctttcataagaatcaattaacttatctaatagtatttttttataatttctcatttatcatatcctctataatactgaatttatctgcttttattgcaagaagcactgtatttacgtaaggagttataggctcaattttttgtggtggtgctcctattaataattgcagctgagaattaaatttatcataaaattccatcatagacataattcttgcatcatccattttatcaaaggcttcatcaaataatataattcctatagattctgaagatgaagatacccctttgtaaagctgcagaaatgatgctgccattgcaacataaaatggagtttgagtttctcctccactcttctccctgcatactttagaaaataatgatgtagtattatcattatatttaatctctatatcatagctcatataatttctataatcagttaatttaataagttctgcttcattactctcattatctaaagttaacttatcaaataattcatttaggagttccttatgcttattttcataagatgtactaaataaagtgaacccctcacctatattttcattatccattatcatatcataatactctttattttctttgcttttcccaattttaaattcgtattcttcatttccaaatttgacatctttaagccccttatttaatcccttaaattcggattttgcagtattaatattttcttgaattttagataaaaagtgctccttaaactcttcttctgcatttttccttgaagttttaacttgctcttcgtattcgataactttactttttacaagattatcaagttcatctaaaaaagtattaataccatttatcccgacttctgctccgaaatcataagtaatattatatgatccctgaagattctttaaatcttcttcagtttttgataatttagttttatttccttccttactcacattaaaattatttttaatgacttcaaaagatttgctttcagtttctttgataaatctctcctcggcctctttagctaaagatccaattttatttttattttcctctacctgcactttttttatagaaagaattcttcttttgtcatcaataatattattaattgaagataaatttccttttttattaatcaattcattttctatcttcttcttacttaaatttaaactttcaatttcctcttgaacttcattaagttttatttgaagggccatatagctgttattcttttctaattcaaaaatctcttccttaagtgttgaaaccttattacttatatccactattctttttaaaacatcacacttttcccttaagttttcaagcttaagcttattaattattttaattatatttgtaactatactaatattttcttttaaaacattaatttcagatagcaatatattaagattagcttttgcctgctctaattgatatttataagcatcttcacctatgtaaggagttttatatatctttggatttatagctcttgcgacattatttttatacatcatacatgtaggtgtaatggatgttttatgttctttcaactctgaaacattagtgcatcttattacatttccgagtatcatattaatatatcttttagcatcagtgctttttgaaaccactacctctgctaaagaattttcaagaggattatcatattttgcaagacctccggtgtttattactccaactgaatgtaatccttgtgctttacttaatctctcataaattttaagtactgaatcaaaatcttcttcatctacaataagataaaatctctgagtatttaaatacccttcaacagcatttttccaaactggatctgtaacttccaataattcgcacaagattttgggaacaatttctcttcctagttttcttgtttcctttataatttcctcttttaaaagtataacttccttaggatattgaagatttctcttttcaagttcagaaatttgtttttctatatctttcctattatcttctttctgttttaattcatactcattcccagccctatacttttccttatcctgtttagttttatcaattacattttcagtatttattgatgttgttttatattcttctatactattttcatctagtgaaatcattttattgtaaaaatcacctatagtatccgtatccaatagaagtctgcttaattctttaatatatgatttttgttcactcagttgtttcaaaaaatgatccttatcttctttttcatgtctataatctttttcagcttgttctaaagaattcttcatagtctctaatgctttgtattcagaattagaatacaaatcggcctgaatattattagcaatctttgttttataagttatttcatcataaataacattattcttgttaattaaagtatcaatattaacattcaaagcagtaatttcttttactttttgttcaatttcctcttttaatagctcttcttctgcttttaatactataaattcatgaagacttattgtccttgaaatactttcatatgaagagtacttaacttctatttcctcgagctttttaatttttacttttacttcatttaaaatatcttcaaattctttaaaagttcgtatattttccctaagttcatcaatattaactgatttttcttctagtatgtaagtatatacaaactctttaacattagaaatcggtttaaatgctaaagcctttggaagcaattcaaaaaatttttcatttagccttccaagtctgtgagaaaaatcctttttagcatcaactatccttgttgatgaaaatgtcatatttaattcttttccatacaatctaaaattagctatatcagcaggttcattattaactataaaagttacatcttcaaatctgcacttttccaatctataccacagaatcttttctgaagtttcagaagctgaatcaattactgctccaattataaaataattctttttactttcctcataaaattccaaggctacgtgagctgaaacatctccacttctttcaaattcattgtcttctcttcctgttttaaatcttacatatcccgataagcttcttttggaattttcattagctgccttattaaaattatttttagaacaagttaagacaaattgaatagcatctaaaattgtagactttcctgcaccattttctcctgacaaaagagttgaatttttaatttcaattgtttcatccttaaatgcatgccaattaactagcctaatccccgttaacctcttcatcatcttttaccccctttcttttataagtttctaatttttcataaatactagttatattttcgcttcttactatcatttgaattgttggataaactatgattctcgcatcactcaaagtaatatctctatccaatgtctcgatgatattaaatttttttaaagttcttaatgcatgcctaagtaatgttttatccattaacctatctttaaacccaagggccataaacctgctttgtatttcttctatttctacaatcacaacttgagataaggataattcctgcattttttcctgatataaaatccttagtattaaaagagtaatactatcaataagttttaatgaaatcttattatttccaaatttattaataagctgtgccgcttttatagatttattaatttcaagttcaaatcctagtggttcaaaatattcattaattgcatctttatgtccttctgcaaaataataatccttttttgtgtcttccttttgcttacaaattaaacaatagcttaatagtttattacaaacccgtttaaattcatctttctccttaatggacagtgaatcatatatcaaaattacttcctccatatctcaaagtttttaaaagtaaatccattattcgaagcaataatatcttttctgttaatggaatacttagacaaaatatgattaccatataaccttatataaatgatcttaataaaatcatctacactatttatctcaatttcacttgcaagaaccatctttttatctcccaaaagttcatcaactatttcatttactttcttaggagaatactgtttttcctgctttttcttaaattcatcaatctttctttgacgttcttcttttgatagtgtatcgcttaaaatcttacctggcttaaaggattttttcccttcatttgcaatatacagagatgtttcatctatatatccataagaatacaaagtgaataagtctgtaacttcctctagataatctgatgataaacttaattcaagttctttatattcattacttatgtactctaaaattccttttacgatacctgtcatatctttagaattgttaagtaagaatttagccctagttacagctgctcttatgtatttagcattcttactatcaatatcatgcataatatcgtctaattcattaaatgcattaattatgttatgaactatatccttaactttttctattccctcatctaatgagcctaattcttcatcttctctgtaaaactctccagcttcacttaaaaattcactactaattaaattttcattaagcttttcaataatttgaggcctatactttgagacattttctgaagtttttaatctatgatatgctttgtcaattacttctttagtatagtttccaaaaaactcctgcataatctcctcaggtgttttctgtttagttaatctatccatatacttttttatatttgaattcaagttttttaatccacttataattcctttagtgttttcaaaaacctgtttaataacgactcctgccttttcatttgaatatagcatagaataaatacttattatatttccttgatattctaaggattctttacttactatttttaagaaagcttctaaaataacaattgcataatcatgaaaatttataatttgtttatagtcattagtctgttctggataaatccatccataattaattagctttctaatcaaataatttgctttttccctattattgttcaactgttcatcttcttcattttcaatatcataattaattaatcctaaatattcttcaatttcatcaactaatatgtctttatcaataccataggacaaaccattttgaaccaatttatatattaaagaaataattttaatatatagagtctttccttgactggaaattggaacaaaaaagttttctggaactatttcaaatatattaatttccttcattatttctccttaaattatctattttacttatatattaccatatttctcattagaattatattcagtaatataattaaagctgagactttctaaatatatgaaaatctcagcttatactttatatttcattaattaacaataattgttttaaatagtaatctcatattctaatattaattctcttcttcatcctcaacaaactcaaatacttcttctactgcctttccaaatactttggctatatccattgccaattttaaagatgggttataccgttcattctctaaatggcctattgtttctcttcttacccctactaattttgctagttcatcttgcttcatattgaattctctacgtaattcatgaatttttgtttttaatcttggcatacttaaaccccaaacctttcaccaacaacaaagaatatatatttaattaaatttactccccctattatgaatggcattatgaattttaaatcaactacccatgaatctttataaacagatattagtgtaaatacactaattcctaaaataagaagatcacataatctagattttgcttttctctgattgagtattgacatttcatcctctttttctgactttataaaatatggaattaaaaaagaaatagatgcaattaataaaataagacctacaatggctttaagaataaaatttaattgaaagagattcaaaagtcccattgctatccaaacaattccaaaaactccgctttcaagtaattcttttgtccttaaattaatttcctttttcatattatcactccacgttatatatttctatcataagttatatatttctaactcatgttataattatataacattaattccactattacaattaaaatgttataaatatttaacatatacacaatattctattttttgtttcatttagttttaataatcacaagcgaggaaaagtgcataaataattgcttatagcgtaatctctaaaaatacaatgtcctcattaaaataaatctctttagcgtaagagtttttctttatcagacttttcttcttcaaaatgagagcttttcaacattcattttttttgaagtccctcatcctgcatgagtaataattctcttatactgcaagtttcaattgtaatcctacttctccaaaagtccttctaataaaagccagtagtttagtaaacttctcctcgatgcatatattataattaatgtgattatatgtaatataaaatgtcattgaaaccatattattttaatattatatttagtaggtaaagtgctattatggaaggaaaggaaattatttatggaaagaagcaacgagatattcgaaaacttttccaaaaaactttatggatttttagtaatgaaagggattagatacgatagaaaatacaaacacaaccaaactggtaaatggtgctgggtatatactatgactgatgaattaagcgcagcgcttaaagagtggcaatctaataatcctagtgtagataagaagaaccaattataaagatactagtattaattactatattccataaaatgagacaagcttaattatttattccatatgtcatatcttataatcccctattatgatctatagttaatttatatatatacaatattatttatcaactaaaatcatattccattatatttttagatgataggaagagtatcggaacatttaacttccgatactcactttattcattagcctaattttttcattatatatgaatttttactatatctacaaatctaaatagtatttctaataacaataaagagctaattgatagattttaatcctttatataatccgaaatatccaaattattttcctttgccaatctaagaagttccttattacttgcactgtcaacacttataataagcggcattattccagatggccccaccttatttaataagtcttttttaagctttttataatcaatattatccactatataatcctccttcactcttcatcattttctataaaagttacattatataattctcttatttcatcttcagttttatgctttaattctctttcataaataccttcaaatcctgcagcttcataatacatttctaattcttcaatcattgtttctattgtcatagcttacatctccctttttatatataataaaattcataaaataatttataagcaatacaaaactatttagatgcgttgaagcatttcatgtaaagttctgctgtagcttcagcatctgataatgctctatgagcattagtatgttctatatctaatatctttgctaactcagtcaacttataagattccattcccttaaaatatattttagataatctcaaagtatcatatattttacatgatatactttttcccattcttactagatatttatctaagaatttcatatcaaatttagctatattgtgccctactaaatcatacccattaataaatttcaaaaactctataagtacactatttatttctggtgcatttgctaccatttcattcgttattccagtcaattcagatatctcttcacttatctttcgattggatttaactaaggaagtaaatttatcaagtacttttccattaactacttttactgcgcttatttccgttatttcatcccatttagcaaactttcctgttgtctctaaatcaaaagcaacgaaggtatcagtgtcagcggaagattctaccgtatatttaaaattagttctagctactgacttatcatctttacttgtttttttctttattgaagctaagtcaatgcctaatttttctctacctttctcagtagctggaatatatacttgtccttcctccatgtattttttatatttttctaaatgatttataatactgtttactaattttagttgtctttcatcaggttcttgtccatatttttcttttactataactaacctctcttctaaaaatgctacagcatcatctaacctattaagtttatataaacaatcacaatagtaagaatgaatatactcatactcttgtacttgtagcattttacagacatctaaagctttttcaatttcatattcacttatataagcttcaactaaaatttttagaactgcaattatgtcatcgccttgaggatataaggttaaatatttgtttgccaactctataatctcattattaaatttagttccttttttatcagtaacatagagtttacacataagagccttttcagtattttctcctttagtatttttaaaaactaaatctgctaactcttctttggataaattctttaattcattattgatttcattatcttctctgttcttaaagtaatcataaaaaatatctacacatttgctacttgaaagtttatttattatctccatatattatttcactccatttatattaaaataatcttcattaacgcaaattatatattgcccattacaagttttggttatataaatcacatatttcaactgcaaaaaaatagagctatttattctttcctcctggctcaaaattatctttgcaccatttaataaaattttcagaatgtaataaataagttttagctgtattttgtttaagataaccctgttttaaagcctcatttacttcattttcatatttttcataaagattttctaattcttttataaattctgcattcgctttcatttattcaacctccaatattcttaattgaaaatattaacgccatatctatccgattatgatatttagaattgttcattaatcattcttgttatatacttccattataatcctataaacaaaaataaggtatacaaaaatttgtacacctttctttgatttatatttaatttgaaaattaaatataaaagctctaatttattattcttattacataaaaagttccttaataaaagtccttaacattgatatttcctgcaaattgttatatttttaactttttttattcttaaattgtaaaaaatttttattgaaacccatattcctttaaaagaatatttaatgtaaaattcaaaaacatattaatttttaaaaaggtttattaaaatatgtaattactttccacaacatttaattatttataattatttaaaaaagctgagattctctaaatttttcatacgccttacctaacagacttgtatttctattgttaatttttctaaatttattacagctccaagcttaataagaacatctaaacctatcaatccatttatttctccgctttgatctattactccaaaatctatatctatattactaattcctatactatcaacttttatctcatcaatgtttttaacaaaagcactgtgggtgcttccaccaacaccataatattccattattctatcattcatttctgcatatatgccaatatcatctacacagtcaggtgatataatagaaccagaagctcctgtatcaataactacattatcaattatctttgatttctccttatacttaatttctatatttgcaaataagagtccatctttatattctaacttcattatattctacctctataagctctaatattcttcacttcaataattatattttcattcgctgtatggtacactactgtaccttcactgcaattcataagttcttttgttgcgcttttattatcatctatagctttaataattgccatatcatctataattttattatttccttctaaatgcgaatctaatatttggatcttcacaaaagtattaggatatgtttttctaacttcatcccatttcataaatactcactccttttatcaaacatataatttagcatataatttatttcaacaattcaccttttgatactggccattctatataactttttatacctcattttcttacctcgattatatcataaatttaaattttaatttaaatgctcatatatctattctataatcatttacacttgttatcatgtgacttatttaataaggttttattatttatcgtttataataagcgacttgctgctaattaatatttaaatactcattatatcttctacaaatcctcaaacaactctttattgtactttcagataaatcactttttcttaattatatttttgcatattcttcaccttttttaaaatcaatgcccctctttgccattgaatttattctagataaatcatcccttattgacttttcacttaatgtacctattgatcttagatattctataaattcatccactaatccatcttccccttagtaattaactttatcaaaataaacgtattccatatttagataattaaaacatttgctaattcatgcaattacctatttcatcaaaagttctatttgtaaatcacccctttgatacttagaatatcataaggagatgaaataaaagttcactcaattactataatcttcatttttttatttcttttattaatgactctttgcaaaaaacatatataactttagcattaaacacttttattagttataatcaaaattctattattttgccctttatcatatttcttaagacttctgataaaggtaccagcccatctgctccacaatttatgatacacacataagccaccctcatttcttgttgcaagccttataccaatgttgatataaaaggaacaactaaatcatgagataacccttgagtatgtcttgctggatcatctatacttggaatatttacaaagatctttttatccttagtatgaagataaaaatgcttgtccgccttcatttcactgaatcttgatttgaatttattcaaattcttatcactatttccccatacataccagacaaaaggataatttttttgttctttctcacaatttacaattttatcatactctgagattttgctaattgcactaattagatctttatcgcatatatacataagatttagcacttgaatataagtattagttcctattgttttattagctactttgtatgctttagtaaatatactcttaacatttggcaaaagctgatctccatctaaatttatgctttgaagattatcagtaatattttctgccggaatagctgatcccggattcttaccaacgactgctccaatgcatatatcatcatctgatggtttatttattttctttaaataaattcttgtatcatatctaaaagtattgccttttatttccttaaattttgcccaataattactcataaaagatttctcctatttaatattatttagattaattataaattcttaatttcacctatttcacttatttccattataatcctataagttaaaataaggtatacaaaaatttgtacacctttcatccactgcttatatgatttgcgaattttatgtttattatatattattctaataatgctaattgaagtaactacaaaaatctttagataaactaatacctataaagttaattttttaatattaattgttatcttttaattctatactaacttatcctcaataaattttctaattcgtttaatttatcttttatgtcatcagaaatttgaaaactttttaattgtcgtattacatcttgattcaataacatttctctagataattctaaaatcatataattattaatttttattttatcttttatagttttagctttaggaattgtattcctaacctcttttttaaaattttcaacatctttattgtcatgtatataatgtctttttaaaatttcgttcaacttagaaacaaaatttccatagaacttgtccatcaaaaaatcaaaatatttatcatttatattcttatttaaattattaatttgattaatttctctagtaattttataaacaacctcctgatttactaaaataaacttattaattttcccacacagatacttccgctttgttatttctccaaatctattaaatttatcacatattttaattaatttatcatattcagatttcaacttagtaaattcgtctttagatatttcctccttaagtttattatttaaaaagtttttatcataaagttcaaatttctcttcgtctgctataatcttatgttgactattttttttcaataaagaagcaaaatttattttctttaggtaaatcttaattccactcatcgaaaaacttaccaaccgaaattcatcttttatttcatttattaatttatttactttataagcattgatttcttcttctgatatacgcaagttattatttctaaagttcttctttatagacttttctaaaatatcttttcttaaattttgttctatataatctattgtatattgacatttatcagtgattacaaaggattcattatcatcatgtgttaatattactatatcatttctgaatagttcttgtataaattcacaatttaaatttacccaatctcgttttattgagacttttatgtccatattctttttatttatcattaattttacaattgtatcatccaacaataatgtttttaagtatattctttcattcgcatcagttattaattttaataaagcagattgcatcaagagcaaatcaatctcctgtaattatttaatattactaattattattatattttttcattattaattactattatataaaaattattttttgatttttatatattcttatcaataaatcctcaattaattgttttctattctattaactaatttttatttaaaataacttttagctcaatcattgaataatcattattatcgcttaagctttatctctaatttaaatgttcataattttgcttaacttacttcgaagtttcacgccttcttcgctcccattagtacttagtcttaaaatcggtatatcatatttcttctgaatatctttatttgtttctgaatctcatctagtctattcttattcttcattaattagtgcctctttataatttaatttttatgtacatgctactttaatcttatcattatcatatcatcaatattaacttggcctatatcgcacaattcaaaaccttttaaatatgtagctagtcctaaggctcttatggatttctttaacttttcaacaaatattgaatgccttctcttataattaaattccctaagtaatgttctaacttttaatcttacgtatgaaacaccttcacaatacgttagctttaatttaatgattctaaaaaatgaatcaattgttgattcctcatctattacattttcaattgtaaaattgcttcctatgtctgctaaaacattattaattgattgtgcttcattaaaataacttgtactttgcatttgttctaaacatctttctatgtctcttacaaacattctttcattagctctatacttagcattaatatttccatcttcccatatcattctcctaacatttagctcatctgaccttgtaaaatcagcccacataaaaaatattgctatatcatatggtgtatatagatatttactcatatctatcacccttgatttgattacatttcctgcatagtaattgtaaattttctataatagtacgtccacctttagccataggcttaatatgatcaatttgaaataaggctttaatatttgatggttttccgcactcattacaagtatactgtcctcgctcatttttatatttattaaagatagtatcctttatctttcttgcttcctctggaaaatgctcttggatataatataaactcatttcttcaatacttttctcatcaaattttacttctggttcactaacacatattggcccgttgccttctaatttattaatttctgtttctaattgtcttgtaaaatataatttcttattaaaataaattcttataataccttgttcgtcatcccaaaggctatctataaatgcattttgctctgaacgcctcatatctttttctactatttcttttgcataaattaataaatctaacttattcctatctatctcatcaaaagtcttaaaatcaggtgaacattctttttgggcataatattttagtatagattttatatctttctcatcataagaaggtaacatatctttatagaaataagtttcttcaatagcctcgcatatttcatttaaagttttttcatcaattacttctttatcaattttatattcatcaaatagctcaggtaatgatttaatcatttcttcatattgtttctttgtgctgttatacacaagtacttgatagttgtgctccatacttactccaatgttatctgtgtcaataaacgagaatgtatacattccaataggaactctctttataaagtcaatattttcaagttttgatgtatcaaccgtatcatcaactattttggcaaattcctctatcttttgtatagatataagccttactgctcgtttctcatattcagagctattatctataaattcttcttcatcttcaattaagttttctgcattaacccaagctatacgttcctgccactcatcaacaaaacttacaatataagcttcctttgttccgcctgctgcttcacctcttaaggctcttccaaccatttgtgtcattaaaatacttgaaactgtaggtcttgttaaaaatactgtttttgtttgtggcaagtcaacgccctctgtaagtatattaacgttaataagaacttgtatctttccatttctatactcttcaatattttttgtattttcagtatctgaaatttctatccctataaattcagcagttgttcctgaaacaataacagcagctttaacaccgtacttttcaaatattcctcttaaagcaaaagcatgcattctattaagtgcaaaaacaagagtttgtccatatgtttttttattttcaacatagtgctttactattttattatttctttctttgttatcagcaatcatatttgcaatatcatctggaatactatcgagctgttcaatgctcttcattgctttaagtcccattccttctcctaaaacaatatctgtactacattcttcaaattgcggtcttgataatatgcctttttttataagatctttcaaatcaatcttataaattatatcatctgtaaatatctttttaagaagtcctttttcaacttcagatgttctaaaaggtgtagctgttagccctaatagtttcacattttccacttttgattttatgtaatctataatatttctatatgtttttgctgttgcatgatgcgcttcatctataacaaaataaatttcatcttcatctttaagccacttatctaatgctttaagattgccagcaatactgtctttacttgctattaaaatatcgtcagtttgttttatatttattgctttatcatgctttcctgatactattctaaaagtaaaagaggaattattaattaataaatcagaataagcatttttttgaaatgtttcagctgcctgctctagcaaaagatgtctatgtgcaatccatattatctttttattcttatcagcagcattttttagtaaccaatagcatgctgttaacgtcttacctccccctgttggcaaaaccaaaagagaatcaaaagatttcttttcatctatcttattaagtgctgccatagcatctccttgatgctcatataattctcttggatttctacttttgtttacttttaccgttcctgaatatgttacttgaatgcttttgttttccattattctacctcgtattgtttattactataaatttctccaattatttctataatataaaactcattatagcataaaatcacacttttttctttaatctaatcaactgaagctcctccaatatgcgtatttagataattatctgcttattaaaaaatgctgtaattaaattctttattataataattgattcattactacaagtttaagtaaaacttagcttccttaataaaatactctaatataaacaaaaaagccatccatctggatagctttttcattactctttataaatttttattttcctaatatttgattaaccctattaacaactctatcaacctctttttgtggattagtccaccaatctttactccaaattctaattatattccatcctctgctttcaagatatctttgtctaaagatatctctttctctagcagatttagaagaatgaaaggctgcaccatcacattcaattcctaaaatatatttagaactgtctttatcatatactgctaagtctatcttatatccagataccccaatttgagtatcaataattaagccttctctcttaagtgcatcatgtacttgattttcaaaatctgaatcataatgtatttcttcatttcgtgaaattccagaatcacaaacactataaagtatttcttgtgcgacttcactattgccgtctgatactgcttttacatattgaagatacttcttaaataatttaggtcctctgttttttgaagaatcaacacttgttagttcatctggctctatagatgtaacaaggtaaatctttttcttagctctacttattgcaacatttaacctattttctccaccgtcttgtgataatgaaccaaagcttgctactactcttccattctcattttttgcatacgcagttgagaatattataatatctctttcgtcaccttgcacattttcaatattctttacgaataagcttaagtcctcattattttcaactctatcaatctccgaatagtacttttcactaaatataggatctttacctgcttcgatttctaatagattttcaattaaatctttttgagtgatattaaaagttattataccgatagtttcattttcttttctattatttaaaatatttttaactatattaacaacttcaattgcctcttcgtgattttgtctatcaatccatctaccattaactttaattctttctattgcttttgttccttctattcctgacttagaaatattcggtgaaacctcaagcttgcctccatagaaagcatagttcgaaaaattaatcaattcatcaaattttgatctataatgataataaagtgatgtcgaagcaaaactgtactttgcaagatctaaaagactttcttcctctagagccgcagctgtttccatatcttctgattcctcttcatcatcatatttaccactaaaagttgacgatggtcttaactgcttatcatcacctgcaactactactttttttcctctatatattgttggaatagaagattcaataaatatctgagaagcttcatcaaatataattaaatcaaataaaccatcggctaatggtaatacctctgaaaccgcttcaggggatagcagccaacaaggatacaattcaaatatactgcttgaaaattttgatacaaactccctgatatgaagaagtttactcttttttgtacattgtctgtacatctctttccatatcttttcattgtatacctgattttctgaagcaatattatcccatttttgattaatgtatttaggcacagcctttctctttttaatcatagcatctgaagtttcttttcttattgtttcaaaattctctatcccttctagctccctagcatattgacgttgtaatctagaaatatgaacctgaatagctaattccggtagtttagaaactatttcattacctttttctaaatcattttccttagaataaatatattctaatacactcttttggttatctttaatatcattaactgtaccctttaatgaacttatttcatcatatttatttagaacgtctaatattaactttaagttttctaaagtttctttatcattatcaaagtttcggattattttatcaacttcatttaaaactattacattatttaaacattttaatttttcagttgtttcttttatactagaaacttcattttccagttctttattaatttctctttgtttttcttcatataatctatgattttcttcttctttagccttgtttttctttaaattcatccagtaacttatactgaatttcgaaccaccagttagcttttctaataaatgcccattctcactttgatttattttaactccacattcatttaatgaggaaacattaatagatatgtccttagagtaagaaaaatatttcaaattatttcttactctttctaaatcatctttatatacttcaagtaaattctctatttcttgtattgcatcttctaagtcataaatatctatatcctcttttaaatatagagaatatttattatctcccattatatttttaagtctataaaatttattaaactttccgtcttttaatactgctttacatatatccatgagttctttgtatttaaaatcttcaaaagggtacgattttctaaaatccttaaaaaatttacttaaattatcattatctctcattacacttctattcttactatacatttgctgtaagtttaatccaaagtcttgctccttagttaatatatctcctaatatttcaagtttatttactttttcatctactatggatgccatagatgctatctcgctagaattcaaaggattatttttaagtaaatctattctgttagctattgttgaataaaattccttcttatctacgtctttattgaacattatcattttagaattaattgctgcagaacgattgtaaattacatctagagctgctttcttttgagaaaccataagcacttttttaccacaacttaaatactgagaaattatattaactatagtttgagatttacccgttcctggaggtccataaataacaagctgcgaattttcttctgctttcttaactgcaatttcctgactataatctaaatcagaaatgaaataaaagtccttttctaagatatcttttcttttatttatatcttcttccccatctgctgaaaaatccttagtgttttcattttttaatagtctagccattaaagcattgcttaaatcattattctccatctctttataatcattataaattgagtttgctatattaaaatgacccattattatattattttttataactaattcacctagattgtatttaagttcagtatcttttgagatttctttaaacctttctgactcaacttctgtatatgaaataattatattaactttctttaattctttaattactccttcaattaaatcatcaccaaatttagttagatcatcatattcagtatttatatttgctattttttcttcattaaattttgcatatccaattaaaaatactttatttaagattactggagaatcaactttgttttttatgtaccacgtatctccctttttattaacctctattggaaacaaaaataatggagcttttgtgaatgtcttatctttaaagtatccttcaacaaaaggatatcctatgtacaattcatatcttccagtttctttttctgtacttttaatttcccttaaaagtgccttaatactactagaatacccagataatttttcttgttttcttcttaatttttcatcatcttcctgtagtttaatatcaaatttctgctttatttcctttaccttttcttctgaaaagttttctgcattttttaacttttctatagcttcctcgcttgctttattttgttctttctttagtttttttaattcatcattataccattcaaatggatcttctaatatctgcaattccttgacatctctgctacttataaattcaattaattctttactaatttcctcatcaaattcacttagtctcataatatcaaaagctctttttttatataatttcttcattacaagacttctatttcttccactaatattaattaatcttgtgctgtatttttctaatatttctttcattttatctcctaattaattaagtattcattcattaattttatagaccacgataaatacaaattttaataacatttaataattttcatataatctctatatagtataatactaattactttatttttctatattttcaagcaatatggaacaatttactcacaaattttagatacaatctttttgtcaattttataatttttattctcaatatcaatataaaagacatcctattaaaaagtgcctttttaaatgtatttcagaatcaccagtaaattatttacgatcctttttatttatctctatatcaatatattttcctactacttcatcttttatattctttccataaggcactgactcctctattacattaaatatctttaaacatgcattcttgatataacccaatgcttctatcggaataataatttttccttcttcgtgtatatatgcatacatgttttcttttaccaatacaaagttagatataatatttgaaggagtattgccttttacaatgtcacatattaatttaaaatatgatttttctaattcacttaaatcatcaattttaatttccgtatattcagctttataattatctgcaagaatattattttcaatcaaagccatttctttctgcaatctgctataataactatttaataacttgatagttattatcccttttcttgagtataattctttatagagagtaattaatctaccttctctctctgcaggaaaaagtacagctttgatattatgcttaattatatattctataacttttaattgagtatcagtatatactaactcaccttttaaactcccatctctagtttttacaaaacttgtataatatctgcttgaaatttcttcactctttatacacttgattatctgttttaaactatctttatagatttctctgctaagatcacacctctctcgagaaataccttcttttaatttgttttcttctatctttatgttataagaataaaaaaacgtcttttcatatgctatcttaattccattaaaataaattgtcccatttttattttcatcattctctaacagtacatctccatacttagttttctcaatcattttcttatctctataaataagaaaatgagattttgcatcttctatataatgatctttacaattctctaatataacctctgttcctagcaattctcgtgtattattataaatatttataaatagacacttatcatcaataattttactcttctttcgatattctgctatatattgatattcactagtaaaaattttaacaaggatacctctagacattaagacaccaatagcatcttttaagccaatgccaaacttaccgatcttccctttctccttgtttttttctccttctttaataagaaaatttgctggtttaatttcactacctttgttagttatcttccaaaccccttctgatatttttccaatgtcaattattccatgctctgcttcatctattgcatttgcaattaactctctaattgccatatctattgtccactctgataaatacgcttgtcctatattcagatctatgttttcaatttttctcatatttaaatcctaaatattattataataaataatattatgttgttactaattatagtacatgtgttaaacaatatttttatgctccaataatctcattacatttattatagcaacgctgaaaaaatatagatctaggtgccgttcaaaaaaacggatgtatgtagtgtatatcatttaaaacctgtttttgtaggtttaacatataaaaaataaaagtacttaattgcctaataaaattaatatttaagctattaagtacttaatttaaatttaatgtatttagttcactaaatttcagataattttaactaacctctacatatcaccataatgctcataaagtcttttatcacatttgttatcaatttaatcattaaactctaatctaatatcacgaatagctagcattaggataattatagtcaccaaccagtagctatctaaattctatagtttttacaatgataatttttcaatagtgaaattatcaataatatcctgaatttctatatgaatacccttaagtattgattcaatatatgctccatctgtttttaaatcatatgctgttttaaaaatcagtaaattttttcttgtagtatttacagcatctttaaacaaatctagagattcagaaaattctacaataattagctctttattactctgccttaaattattaaaatatttttgaaattcttttgtttgactatataagccatcaaaatcatcaaaagtgcatgtttctttttttttaaataactctttagttatatttaaaatatcttcatacctattatatatttcgggatatgcttttttaaaattgttagctttttggtataaatcatttcctggatgtcttaaatcttcaaacgatttatgtatttcactattaattctatttagatttataatatctcctattgattgtagtatagagctaaaaagatattgggattcctcatttttattactacttaaatattctttacatatattttttaacttctctaattgctctagatatgcttcattatcacggtctatatttaccaattcaattgttttaatctgtgtatttattgttttaatactgatatttatttttttaatattgcttataatttcttgatcacaaattttcacactacactctaactctttaattttatttagttttgaatccttaatcagatttccatcaactatatataaatctgtttccttattccacccaaattgaccatctaagatattgattggtgttagattactacttccaactaatgctccatagtatttattttttgaaaaatcagaagtattttcttctatctttatagcaactttaccatgccagttgtcaccaataactcttttaaatattatcttaattttggatttatccttaatatttttatagagttcattacaaaaatcaataaaattattaggataactgcttttagtatctgtttctcccccaactatcacgatagttaaactacttgtagcccttaaatttctattatctatttcctttgcaaattcagttattgctctactatttgctgacttagaattatggatgtatcctgttgaaagtattaatacattaccctccatatttactagattacttaatgcttttctatatagactttctttcatatactttcttaagagaaattgaatcgacatttattatcccccacataaatattatatctataatatatttgttgatttatacataaatgccttttaatgatattttaaatggataacccaaatgcctcttagctatctggtatggtcgtaaactaaattaaaaatcacatatataattaatagactagtgaagaacttatattgttttatattttaccggtttattcattttttttactaatccatcctcaactgctctattaagccaatcatttgcctgttttttattaacatgaaatttttctttgaattcatctaatgacaaacctgtttttaatgattcttttattttatcaacgattaatatatatacatcataatcattgttattatttttctctatattacaaatgtctttctcatcaatatcaattgttgtattttctttctctattttaccgttattattatcaatatttttagaatcagttttatcattactagctaatgataataaatcacattcgtaatatggttgctccacacttttattttctattttatattctttaaatagcaattcaaaattagaagcttctaatttaattccacctaattttattagttcgctattacctttaggaattttttcttcatatctaacaactattggaacccaattattctttaagttttcggttgctcctgcccatgttccacctttattgtaatctgaagaaacaactactgttatatcagataagcagtatatatacttatttctatccatagcagaatatacagtaaaaccactctttggattaacagcactcattaaaagtaaattattactcattattgcttctcttatttcttttttcttaatttttgaaatcatgctatcagcaataaacgcagctacttttccaccatttgaaagcacttcttcttgtgatatgctgtcagcacctcttgctcctcctgaaactaatgaataaccttcattaactattttatatgctatttttttggtaaattctagtccataggtatcaatatttcttgatccaacaactcctattaatttattatctaatatagaaacatcaccacaataatatattactggagggcatttttccttaagcttttcttttaatactttaggaaattccttttctgctcttgtcattatatttatccccaaattattcaaaatatttatttcaaagcctaattgtcctgccttagataataaatttattattctatcaccttcatcatcatttataaataattgctcttttaaatcttctttagataaattaaataaattagctggtctttttatgctggaatttaaaagtattttagcaaatttactccattcaatagctgtaaaaggtttaaccttatcaattttataatttaatgctaaattactacataaaagcataatagctaaactatctttatttaaattaccactattcattattattcatctcctccgtttttagcagttgacgctaaagcatatggatatactttatttgcaccttttttctttagcatagcaccacatacagtcaatgtccatcctgaatcaatcatatcatctatgagtagtacattttcataatgtatatcctcagttattaagaaagcgttatatgcatttctcgcctgcatatttgaattttccatagttttctgttgttctgtctcattaggttttattataacatcaataaagtctacttttaatctttcagcaactcttttagcaaaggattttacaagttctggtcttctaagtgaaggaactgccgcaacacaatcaattttctctaattcatcccacttattatttactaattctattgtagcatcaacaagctcatctctaaaatatttatttttatacttatcttcttcaatcataattccatatcctgcatcaccataatcagctaaaactcttccaatttcattttgttcttctggaggtatttttttagctttttcatctattacacctgctggccattgtctattaactttcatttttataattctatttttaatgaaactttcagcttttagaacattttcatttctaactttggcgctgaaaaactcttctcctgtacaattactacatcttccacaattatcacctgtatcatcatctaattcatttgctaagaacttcatatagcatgtttcagtatctacatattcctccattaattcaagctctttatatctagtttttagaacttcttcaactttaaaattatcataattatatggatttaaagttctcatatactttgttccatctttagctattactttatttaaatctagaagcgaaatacatttctttattccattttgtgtcatgttaacatatttcttgagatcatatgtgcttaaaccattttcgctgttttcaatcaaatgcaatacattttctaactgttctctcttaggaaatgcattttcaataaaatattctgaaatatcatgatcttcattacctattagtagaattgcatatgcattatgaagctttcttccagctctgcctatttcctggtaatatcttataatattgccaggcatttgaaaatgtataacaaatgataaatcacctttatcaaatcccattccaagtgctactgttgatacaagtaccttaacttcattatttattaaaagcttctccctttctgcccttaactttttattttcttgattatcctttgataaatttgagtgatattgtaatgcatttatactattattttttagaaattcgctaactttgttgcaatctctagttgttgaacagtaaattataccagaaccatcaattttgcttaaattttcaataagccatgccattctttcactttgttttggtaattttataacctgtatttttaatgattctctcattagtggtcctcttattaccactaagtcttcaccaagctgagtttgtatatctttctcaactcttttatttgcagttgctgtagttgctattattggaacatttggaggtagcactcttataatatcaactattctactataattaggcctaaaatcatggccccaatcagaaatgcaatgtgcttcatcaacaacaatcatatttattccatcttttataattgggattactctattaataaaatctttattagcaagtctctcaggagatataagtattatctcacaatttcctttagttattttatcttctataacttcccattcatctacattttcactgtttatagttaatgcacgtattcctattttttctgcagattcaatctgatttctcattaaagataaaagaggactcactaaaattgtaactccgcctcttttttctttaataagttttgatgcaagaaaatatactatactttttccccatccagttttttgaatcactaatgttcttttattatttaatgcattttctatagcttcccactgaccatcatgaaactctgcactaggacctatcatttctttaagtaatttttcgccataccttctcatttccatctgccatccccctttatatttatgttagtgtaaagtatttacactaatcttcttaattttttctttatatatcaagggttcgaacgtttttttttataaaaaaaacaatgccccctaatttcatgttataatcgaattctcacaaaccaaaataacactaaatgaaaggtcattgttatggattcaattataacttatttacttttatataatcaatatttagttaaaactatttataaacttgttgtctttatttcaaaaaatattcctttgagtcagtgggctttcgatgattctaacagccctgaatatcaaaaatttaaagtagataaacttcctaaaattattcgttttgaaaaagttgactatcaatttcttttagcttattacaaacacaaatataataaggtagtgaaacccatccagcgacggaacggtaagtctattcctaatgaaactatctgcccaaagtgtggtgcaccccaccattatatctacgataataacggtaatcgaggtcagttccaatgtaaaatttgtggccaaaatttcaacgaaagtaattatgttactaagcctatagtacttgtatgtcctcattgtggccatactctttctcaaaagaaagaccgtaagcattttcgcattcataaatgcacaaatcctaagtgttcatactacttagatggtcttaaaagacttcctagtgatataaaatcctctgagaaatataaatacaaacttcactatatttatagagaatttactgttgatttctttaagatggacttacatgcactttctaagcgtgctatcaaccttaattttaaaaagtttaatcctcatattatgggattatgcctgacttaccatgttaatcttaagctttcaactagacaaaccgctcacgctttagcggagatacatagtataaaaatatcacatactatggttgctaactacgcattaactgcagctactgtaatcaaaccatttgtagatacttttgattacaaaccttctaatatcctttctgctgatgaaacctacataaaagtaaaaggtatcaggcattatgtttggattgttatggatgcttgtaaaaagtctattcttggttatcaggtatctgacacaagagctgttggtccatgcatacttgctatgcggatggcttttgataagtttcaaatctttcctggtaaaatgctaaaatttattgctgatggttatagtgcatatccgctagctaaacaacagtttgaactagaagaaaacaagatctttgatctcactcaagtaataggacttacaaatgatgatgcggtttctaaagaataccgttgggttaagcaaatagtagaacgcttaaatcgtactttcaaatcatcataccgtgttacttgcggctatggaagtgaagatggtgccctttacggagtctcactttgggttgcgtattacaacttcttgcgtccacatccttataattattggcggcctctaaatgagattgatcaattaaaacaagctgataacatgcctgctaaatggcaaatacttattaaccttggtcaacaagctatacttcatatgcaagaaaatcaatgctcctgagctatcgctaatttaatataatttacattttttgccttcgctacggaggtcttttgttgtacttaaaattaatagataaattactaaattatatattctttactaatattgttaggtttcttttatttctatttttttcatagctcactttacactatcatatttataaacattctctcttaatctataattccatagtaaacctctccatattctttaattacagataatttattatctaaatactatatatattaataacagtcgtatttaatacgttatatatgaatatcttttatatatctttacttaatatttcctccagcaactccaaagcattctcatcctcttcgcaattagttccaagtttccctctgaaagcctttgctaaaattgatttctttattaattcaatttgcccttccaattgagtaagttcctctattttatcttcttcttctaaaagcttatctaaaattttaacaatttccttttgttcttcaatcgaaggaatctttactaaatattgatacaataattccgtgcttatgctttcaacagttgtaccacttttagaacacttatttctaatatcagtttcacttgaaacacaaacccaatacagatattctaattcaatgttacaaggtaccaatattttcatatcttgatttacagtaaaacctttataacacattgcaataggcaaaagccttcttaatatcccacttctaacaacaaatatcaacgcgttttcttctatatactttacacttgaattatttatagcttcctcagttattttaacctcagaatcttctattattttatatttcatatccttgggtgtaatccaatttatagtcccattattccaaaaggaattgtttgctttactaggagttccacctccaaaccattttccacattcttttaatgatcgttcttcccaatttttaagactaatactatttttttccgccaatctttagttaactcacctttaacagccttatttaaaatagctactttcctcttctcaaatccctctctagcctcttctatcaattccttagccttatccaacttttcaaaaagactttctattctatcaacaattctttgttgctcttttaatggcggaagaggaactgcaacatctttaagaatttttgtaccagcaatgtttttgatagctgatcctcttgaatcatctattatttttgatataaacggttctgagataaataaaaacataaaatacttatttaaaattatactttcattcaattctatctttaatagtgcttgatttattatcccttcttttgccccttctggtattaatgctatttttccaacagtaccagaacaacttacaattaaatctccaggctttacagaaaatgcttccagttctttatatttattttcatcaatgaaataatctcctaaattcatatcattatagatagcatttttttgttcatatactttatatcctatcggtacaaaataatccttttttatagcacttccaaacggacctctttttaaagaatttttattgttacttaaaatataatttaatttcacaaatccccaatttcccggcacctcataaggcccattcttaacaatagcctcttcaagcttttcttcagaagtcatattcttctttgccattattattcctcacttccaagagcttttaattctttaataacactcataagtaagtcagttgcttcttcaagctttgctactgcttcttctgcactttctattggatctggtaggtcttcgtaatctaagattgaatcatcttttataagtcctaaatctaaattattattcttttctttgatcacttctctagtgaacttattccatctttcatcttgaacttcttctctattttcagcagtatatgctttcacaaaatcatcaaaatgtaattcctttaattgatttgtcttaccaaagttttgcatgtttgttcttaaatcatagaaccacacttcttttgtattatctttatcagaagtacctcttgtaaagaataatacatttgttttaactccttgagcataaaaaatacccgttggaagccttaatattgtatgtagattacatttatccattaaatcttctcttatctttgttccatcaccttcttgaaataaaacattatcaggtaatattactgccgctcttgcttttccatctgcatttaagcttctatatatatgttgcaaaaagtttaattgcttatttgatgttaaaaaagtcaagtcatctcttgtagctctttctcctccttgtttagttccaaaaggcggatttgtgtttatatatagttgcgcattatttatcataaataacaactcctttaccttaacttaatctagaaatacattatctttaagtctttctagaaccttataaaaagaataatgtatgtaaaggtaataatcaagaggttaacactaagatcttgactattacctttacatacattgaacagtcgctatggttctatgcctaatactatgaatacagtattccaataaactaaatataatagaaagcactacatctaaatccttcatttgttttcctacattagttaatgtatctccaagaattatgtttccttcaatgtcatgaagcatggcattcataagagctaatctatgagtttcatgaactaattcacaacccgtaaatgctttagttctttggaactcttgtaaatctgtatctaaatcaaaatagttatctgttttttcttttaaataatgatctgctccaatcatgaatccaaaagttcctgctgctggatcattacatttttcacctggttttggatctattaatttaaccattacatctattaatactcttggtgtaaagtattgtcctgctcctgatttcttttcagatgcatttttttctaataatccttcataaagattaccaagtccttcttctttagctgaataccaatctaatccatctatagttgtaattattttttctaagttctttggttcgtctatattagtagctgaaccttggtatatttgttggactattcctgtggtttcttctcctaaatgatttaatagctctttatagaaagttttaagttctattccactctttgattttaaatcatcccatctatattcttccggcaatttgccttctgctcctgtttcttttgccatctttaagaaaagaatatacgttaattctgttacatattgatgatatgttataccatcatctcttagtacattacaaagattccaaagtttgcttactatttcttgcgtattcatatctagctaatccccttatcttcaaacatatatgtttttagtttgtttattatatcttccaagttaccattaaacatcttttcatttaatctgtcaaacccgccgctttgagctttaaaacttcctgtatctagagtttctttatctataaccacttcttttaacattactttttctattctacttagccaattttcttgaggttttgtaaaataatattcttttttaattttagaaactgctcttttaactctttcctcattggattctaggggacttccgagtgcctgttgtcttataaatgcaattatatctgctactatttcttcattatttaagtctttccatgcagtctttaagtattcctcattaaatcctttattatctaaaatggctttaagctgttttaaagattcctttgttaaatcttgtggtcttgtgcagactacttctaaagcttgaatagtatttttattttcttcaatatactttttaaactcatctatataatcttctggttttttacctttgccatatcctcttgtatgtgatacaaccttatcttctttgtcagacactattattatttcttcattagtgtatttttcatctaaatattccactaacgaattatttttaattatttctttagcagctgttttagtatcaacacctcttagttcattaataaattcttctggtgttttatcattacaaaggcttttaaaaattaatctttcattttcatctattaatttctttttcctctgtaattttgctattaccttgttaactacagcttctttttcttcagcgctttctgccctttctaaagtttcctttaatactttaaaacttgcattagcatttgcagcaactggcttcatatttgtcatatctttaagagcctcataaagcctaacacagtcaaatatctcaaaatgtgttttttgaatatcatcacataatcttgtagctctacctaacatttgctcataaagtattcttgattttactcttcttaaaaatactatcttatcaattttaggaacatcaattcccgtagataataaatctactgtaaccgctacgtttggataagtttcatttttaaacttcttaatagcaagatctggatcttttatagcaccagttatttttaaaattgaattatcatcaactccacctatagtttctttatagatgtcctttaatagtctaactatcatatcagcatgagcatcactagctgcaaatattaaagttttacctttatcattttcaggatctatatagtttgcaacatcttcaagtgctgctcttgtatgagcttctacaattacttttttattaaactgatctatttcaaaatcaatattatcttcaagttctgctccattaataagctcgccagtatatttattatatttagcaactttatctcccttattataatgaactccatctcgagttagttcagtttctataaggtgaggtggttcatggtccacaaggtatccatcaataactgcatctctatagctatagttatatacaggatttccaaagatcattgttgtatgaagagctggtgtggctgtaagtgctactttaaaagcatcaaaatattctattacctttttatatttgcttaagaaatccctatcatctctccactcaacttcagtatcggtcatttctttatctaaagtatatcctctatgagcttcatcaactattatgcaatcataatccccaacagaaggcacattagtttcatcttcattgtacatgattcttttaaccatagcttgtactgttgctatatgaattttagtttctttatcaataagcttttcatcaaggccattaatattgtaaatttgatttaaagtctttagatcttctatttttacttccttaaatgtatcaaatgcttgatcccctaatgaagttctatctactaaaaatagaattcttttatatctattagtcttaatcagcctataaataagacctaatacggttcttgtcttcccagtacctgtagccatagttactaaagctgatctttcttttccttctgtaataactttctctacagcttttatagcttcaacttgataatctctaagacctatgctattttctgattttaaaaattcaaagctcaattcatctaagctcttattagccacttcaatattctcctcaagcatagcttcaagcttttctggagaataccatccttgaagaactttatcattgtttcttgcatttctgcaatctaagaaatgaacaccacttttatcttcaatttcttttatatattttctgccattagttgcaaataaaaatggtactttataatcattccatttagaaataacataagcctcgtgttcttcttttacacctacagcatagttttttgcttcaatcatagttccagctacatctttagaatattttttagcttctacaaatccaactaatctttctccaataaataatgcataatcaactttaccattacctttttctattgaataagtaggccattcagctatagctaaatttcttcctttttgaggtcttatcccctttgaatatcttatattaatagtatcagcttcccaacctgctgattttaattgatcatctataattcttcttgtttcagcttcactaagttcaattcttctgctagcctttttaccctgttctctacgcttttctatctcttccttatccttttcttgagcttttaaagcattaagttcagcttctaaagctttatatttttcttcatattctttagatatatcactaacattttctccgtactcattttcttgctcatcaggcatcttaaatgcgctagcttcaaaactccaatctccataagtttgcataaaccaaatagctaatttaaatgttaactctaattgaacttttgctttttcaacatcctcaaatccattgtgagctgcatcatttctttttaatctgagcatatggagtatattatcaatatcctcaggaatcaaatcttccttttttaataacttaattctgttattatgactattatcatgagctattaaagtagtatccatatcttccattgaaaacatatattgaactacaatttcaccaaacataccacatttaataaatgtagtatttgaatctatgtaaagatttctctctgctagtcttcctagattttctagaattggccatttttcttttaggaaagtaaagttacccataaatccaccccatttatgctaaattattactattttcatttaattatattatactatttaatcctaattttacctaatgtttaattattatatcaactcatgttaaatacttttagaaaataaaaatctttaatctactataatacttttacttttaataatagctaattttctataaggcagttgagaaatataataggtatcaccttgttgagctacaacaattccttcttttttatcatatgatttagcttctttactaaactcataacttattatatttgatggataatttttcattactgcatcacctatatagctaccatatgcaaatacacaagtagcaaaaactggacacaaaattattacaccaatgatccaggcacaagtgataatcactttatcatacttgctactttgcgtgtctatcgctttattatttttcaaaaattttactctatacaaattcataatttcatatctagaaccttctaaataaattagcataataagataaacaaaaaacaaaaagtacatttcttgatcatatatactgtaacgtaacattaaaatcataaataatataattcaaatactttttcctaaaacttttgctttttttgcattgtatttagctatttttttgtttatctgaggaatcacaaagaacacataaattgatgttaacactattaaagttggattttcataaaataatattatgttataaaatgaattaataatggctactaccaataagtagtacattgcattgataattgtcagctttttataagtttgaaaattgatcattgcataaaccatatatacgaaaaaaataggaattcctagtatggttactggcaatactgcttgattaatacttaccttgccccaaaacatatattccaaactaaatacaatcaagaaaataattataaataaaaatataaaagcaaatacattagacttatgagatatagatattataacgggaaaacatagaactaaaatatatattaacaaaaatactccaactactactatagctttaaaattaaatggtaccggattaatggagatattaaatattgaattttgtacatccccaccaaagtaaaatccatatatgaaaacatatcctagttgataaaaaaagtatactattaagaagcttaacagcgtccaagaatactttggatatggtaagtccattaaaaattcaactaatttatgatttttaatattttctttaatttcttgtaattcatctattaactctgctttattttccattaatatttactcctatttatctttaattgattaaaactccatgacatacaagtactaattttcttcaaacataattattattctatacattacatttcaccctataaacctgctttatcaaactaaagatatactccaattcctcatcgtcagaaatttgaatctcataatcgccattcccccagtgaccagtcttagacatatcttttgcaatacctttggaatcatctatagttccccatttagtattgaaccagatctttaatgctctcttttgcaaatggatatccatcataattttattgttataaacaaatccaatctctaattttttagcttttatagtgatgttgtcatttaatgaagttatatattctttaatcctattatataaatcaatgatttcttcagaagaatttttgaaatgatcttcttctgtatatacaatcacttcatcaattacatctctagtttgagtatttgtatttgttttggttattaattttattgattcagatgttttagatggcttaatattattaaaataaactgtattattagagaatttcttaacttcccatagttcgaaaggtaaatctttaaagttgattgactccttttgataattattaaatgatggtgatacgaatataactcttgattgtgaccaatccacatcatctctctttaaagtcgtattacaattttcattgtattcaagtataaactcagccttattatttaataatagagataaataagcataaccttgatctattacactaaagctacttgtatttttatactcaattattacaaaagccttgctactctcatcaaaagctaaagtatctaatctgaaattattaaaagcaaattctcttttaataaactttaatccaaatatattttctaaattactttcacataatttatgtaattctatctcttttttgaatggtatttcttttatttcgtttagcttgtcttcatttattttgtataaaaacatatattaactcctaacatgaatgcttaatttcttaatatttctattccaaatcctttggattttctaatttccttaatttttcctttgcttatatatctctcatttccattttctaaaactaaataatgttcatcgtattctaagtagcaactacatataattatttcttgctcaaaaactattgtgtagatatagttactattcaacatgtccagcacatttaccaaactaattgatattataaaacttattaaactaaccatgctaattaagcctagtataagaactgattcaatatcttctttttttatccctttaataacatatgcaaggatcaggattagactagaacttcctaaaaatgtggaaattattatgtttattatatttagctttctttcactaacattcttgattatatttagtgtgtttccaatatgtaacaagaaagaatacatactctttttaaatattatacttttattctgactttccgttgatttcttctcaattttatctataaacttactttgtaatctaccaaaaacttcttgagttccaaacattagataataaaataacattgctattcccaaacctataaattgatatatattgacatttaaattcaacaattcattcgcatttaaattgttccccttttttatcactgaatatgttaccattataaatgaaaatattatagtaacggtagaaataaaagctattatacttttcaacactgtatcaaaaattgattgcttacctggtatcattttgtatcggcttttaattgtctctaagaaaaatttatttaatgttttaataaatactccaagtactgttataattgtagttattgacactaaaagatctcttatataatttaattccatcaataaattcctcactttctagtctattcatatcaaatcacttttatatgaacttaagaagtattcaaataaatttttccaaaactccaaacccttgatttaccgccactccataaaccggaccaatcccttgtttcattctcctaacgaattcctcttccttattttcttttttaaacttcctaagattctcaaccttaagcacttgtccatattcttcgagttgattttttctgttttcatcaaccacaaagcaaaaggcttcgtattgcatttcacaaaacttatcaatataagtatcatattggagtaaattatcacttttcttactatttatattcttaaacgtcggtaccaaattccacatttgatcatgaaggacaaagctccaaggtataaagtgatctatacttaaaactccataataattataatttctttctgtgaaatctaagcctgtgtacaaatcaattatatgccttcgttctataacttgcttccatatctttgtctgttctctcaaatctctatttttaggagcttctaatttcattgctatacctggcacatttggattgcgcttttgcaggaagcataccaatttataatacgcccagccttgaataattctgtagttatactttaagtaattacaccaattatctttaatcctaatgcaattttcatccttatcatttttataaatttcataaatgcatttattatcttctttagatagttcttctatgagcttttgaacttttttctggcctctaagttcattctcaaaaaatggcgacaaaaatctataggggacatttagtgttagttccttaagcattttatttaatactttatcttgcgataaatatataaaatcaaaaagcttacgttcatcataattactttccaagttatatgtatctgaaatgtaagtagctacctttgctaaattatcacataatccaaaactcaacttatatttcaaaagaggataccaagcctttacgaccattttacatattaatgttctaaattctatttcaaaattatccaaagaaatttcatctaataaagccagcagctaatacatcttataacttgctacaaccttatcatctctaagtgctctagaaaatgtcgcataatcaacttcattactataaggaacttcgcatatttcttttggtaatattatatcttttcttgtgtatatatcattcataaaactctccacccaacatctagtgatatacattataactatattttaacataaaataagagcttatattaaataaactctcaacaaaacgtaatgatctaccttataaacttccgtccaatactttcctgtattaaatattctaaaattgttatattatagtactatctaagaaatattgacagaaaaggtgtgttattatgaaattctatcaaactaaaatttttaagattgtcatgagtcttattgctctcgcaataattttcaagtattcatttttaatctttctatctggcgcaggacttataatatacttaaataaaaagaacgttaaattcagatcttttcccaaagcaggtaaaatatttttaagttctgttttaattttgcttactcttcttataattgcaataaaaaatgctccgactactaacaaaacaattgcttcaaactccaaagttgaaactacaacagaatcaacaaattcatctgacaagccatcagagcaaaaagaagccgaaattaaagaagattccaaaccagaagtaaaagaggagaatacagctgtcgatgctaaacctaatgaagataaaacaaaatctgtagacaattcttctgcttcggctgccccttcaactattacaaacagcgataactcaacaaaatcgtcagggagcataagtacaagttctgctagtactaataatgctacttctgcaaatagcggagatgagaacacaatagtatattatgttcctggcagcaacgtataccatttaagcaaaagcgatggaacattaagtagaagtaaaaacattcaagaaattactttaaaagaagctaaagctaaaggaatgcaccaatctaaatcaaaagctgatagttagtagtttccgatattatttaagttctacatattttaaaataaacagaaacagtttttaatttaaatactaatataaacaaatagcttgctacgataaaatataaatatcatggtaagctattttctttgcaaaatgcaagctaatagtctattctttgttataaataattaattaagtccttataaaatctcttaacctcataatcctgcaatccagaaacttgtccatcttcaagttccattataatccactttgcattagtaaaattcagtttctaaatcatcttctaaagatggttcacctttatcaaaaattatattccaatattcactgctatcatcaccataatatgtcccatctgtaattgttttgtactgtaataaaattgataatttgtatgcaatatatacatctactctagtttgatcatcaaagtcttttaatgaagtttttccttctgttaaaagctaaatgccaaaacaatctcctcatcttttcctattaccggctccccttcagtaatcttcatcagatcatcattttctacttcatcaacaacactaatttcattaatcttctcttttttcttaggcttacttttattttttacctttttcttctctaaggcagttaatatctcattaggtaaatgctctttgcttttgtatttttccatatttaatttctgagtggtttcattatctacttccgttacatttttattacagctgtttaaaggtacacttgtacttgtttccatacagcttttattattagcattagtgacatttttatttgcaatattatcttttatatcaattactttattatccttatgtttattcccactctccacattaatattctctatatagcttctgcttagctgtttcttctcgccaatttcaacttcttctgccttatgtttattttgaactttttcttttgttttaatattttgatgctttacaaagttttttactttatatatttcatcttgagtaagttcaaccatttctaagtctataaaagtttttatagctaattctatttcaaatacttctctattgaactctatagccaaagtctctagagtatatggtatatttctagataaaaataattctccttctaaatttaccttgcctgcaagaaccacaagcctagtccaaacataatttataagatctcttttttccattctatctattatttttaactttgtatcctcatacatattcacattaaatttaacacattttctttctctcatttttaacacgctcctatataaataatttatctatataggatatatgcttaaaaatgaaagttactaatataaattaaaaattattttattcttcctataatttagcttctaaaagcttgtatttttcattttaacctctgaaatcaattttaaacttattaattactccatatcttaatataaaatagattcttttatactataatggacttcgcatatttcttttggcaatattatctgttcttttgaagtatatattttattcattttaattccacccaacaaaatacaatataaatatattctaccatgaaaataagagcttacattacataaactcttatctaaatacatcctatttaacaatgataaaaatcaaccaatttgatcagctgggattataaccccaaattgccgatttatgatattaattttaaatatttatagtgcaatgtccttccttataatcccttaaaaataatggaatttgatcaattggtgcatttacgagtattgttttcccaccttccattttttcttttgtccatgtattagtccaatttgaacctactggcagatatacctcacgttcagtctgacctttttccataataggtgcaactaggatatttggcccaaacatatattgcgattcattttcccaacagagcttatcctctggaaaatcatagaacattggtcgcatgactggagttccttttttatgtgcttcttccattaaagtagtaatataaggcatcattgcttctcttattttcaaatacttcttgcagatttcatataccttatctccataagaccatacttcattatcagcaccggatacgcattcagctccacctgttgttccatactgaggtttgaaaggccagcgataaccatgaagtctcataactgggcagaaagttccgtattcaaaccaacggatcaatacctcatggaaatctggatcatcaatatgtcctccgaagaatcctccaatgtctgtagtccaccaaggaattcctgcaagtcccatatttaatcctgctgcaaactgatttctgagacttttaaaggaagaatgtatatcacctgaccaaactaatgcaccgtatctttgagatccagcccatgcacagcgtaacaaattaattataccttcctgtccttcttctttcataccatcaaagaatgtttttgcatacatcataggataaatgtttcctacctgcacatttggtcctaaatgatatcggtaattttcgaaatcataaacactatattcaggctctgcttcatcaagccaaaaaatcttcacacccttatcgtagtaatttttcttagctttctgccatacatactctctcgactcaggattagtagggtcataatgtatagtatttcccatgaaattcatacaaatgcggaaacctttatctgttctaacgagcaatcccttattcatcatttcatcaaagttttcacttctataatctacagttggccaaatagataccatcaattcaattcccatgtccttaagttcttttatcatagcatctggatctggccagtatgttggatcaaacttccattcgccttgaagtggccagtggaaaaaatctaccacaataacagagataggaagattacgtttcttatattcccttgctacttctaaaagttcttcttgggtctgataacgtaacttacattgccagaatcccatagcgtattttggcatcataggaacttttccagttgcatcagcatatgcttcttcaatctctgctggagtgtctcctgcagtaatccaatagtccagcttctttgtagaatatgcttcccatgtagtaatattctttccaaagttcacacgtcccactgcaggattgttccaaagaaatccataacccaaagatgatagagcaaatggcacgctagcctgagaatttctgtgtgctaactctaaatctgctcctttcacgtctaagaacggctgttgatattgccccataccatagattttttcatctggattagaaacaaacctcatgcttagatgataatctcctcctataatcggcttgaattctcttccttccacttcaagggaactacaagtagaactatacatatccttacgattacgaacatattcctctaacagcaattcacctttctgattataaaattccaattttccaatctgattaatcactgctgtaatcttaccatttacgatttttgcactatactcctcaatactgatcttagcattagatggttttggttctataagtgcccaatcctccataggcatatctggtccttttgtggctttaatccttaaactatttgtcccccacggcatgataataagacgttctgcatcatatctatagcaaagagctccatccttttcctcaaaatatcctaataaaaattctctgttatcatcaaattgtcccatattaatccctcctatttattattcttctcagtctattgtgaattcctaaagtatttatttagctaacttttttcctgttacattttaattattcctttactgcaccactagttagaccaccgattatatatttttgcatgaatataaatattgctactaccggaattatagtgagtgtaccaaaagccattattttattccaagctaaaccgtattgtcccataaaattataaattcctgcagtcattggcctcatgctttgctcattcataaatgttaaagcaaaaatcaaatccccccaggcaaataagaatgaaaatactgcagccattataatacctggataagatactggaagtataattcttataaaagcttggaatgtattgcacccgtcaaccctggcagagtcctccagctccttaggtatggataaaaaatacgttcttagtataattacaacaaatggtatagatattgtgcagtcagcaaggataggcgataagtaggtatttaatattctaaatctcccaaatattataaacattggtgttaataataaagttgccggaagcatctgagtaataagaaatgattgaataaatagttttttacctttaattctataccttgcaagaccatatgctgatggcactgcaaaaagcaatgtgatcacaagaaccgaaaaacttatgaaacagctgttaaaaaaacctttgaatatgctatattcaccagttatttgagcagcatatgcacttaatgtaagctgttcaggaaaaaaggtcggaggatttctaaatatttcagcatcacttttaaatgaacttataattacccaatataaagggaatagaaatattgctccaactattacagctataatatttaaaataatgttagttctcggtttaatatatcttctttcctccaaattacatcacctcatcttcttttattaattttacatagagtaggcttactataaatagagttaagaacagaatattggctactgctgaaccttggctatagctatattgattgaatgatagcttatatgataaagtagacaaaacttctgttgcatttacgggtccaccatttgtcattataaaaacaaggtcaaatactttaaatgtataaataaatccaagcattaacactgacaaaattgcaggttttatagatggaatagttatataaaatagtttttgaaaccaatttgctccatcaagactggcactttcataaatagatttaggaatcgtactcaatccagttgttaaaagaatcatattaaaagggattccaacccatacgttagttataataagtccccacattgcactattaggctgtataagccagtctaaaggctgatttataacatgaagattcataagtatttgattaataactccaccacttggactaaacataaatttaaatgataatgcattaatagtcattggtattaaccaagataccataaccaaacctcttataaattttgaaaaagtgaattctatattaaagaacaatgcaaatgcaaaacctagcacaaattgaaaaattatacatacaacagtataataaagagtatttccgatagctaccagaagcacagagcttttaaataattctatataattcttaaaccctacaaattcttttattggactgtttacagtcataacattaacgtcttgcaaacttagtaaaatattatatattattggataaccaacaaataatagcataaatataacggctggtacaataaacatataacctactctattcttatgcatatttctacctcttttcattttctatttaatatggatagagggcttaattaaagcacctcaaccatattaacatttacaaaaatcactttaataccgcatcaatctttgtttgagcttcatctaatgcttcttgagggctcttctgcattgtcaaagattcttggtatgcagtgtaaattgcttcagaaatttgaggccattttggatgtggtcctctaggcatagcatactgcatttgatccataaaaactgctttattaggatcttcagtccaaactttatcgttagctaaatcttttctaggtggaaaatatcctgtattatttatgaagtctctaacattatcagcctttccaataaactttaaaaattcccatgcttcttcaggatggtgccctttaacaattcctatattttcaccaccaagaactgaagcatatttctgatctttaggaatttttacacatgcccacttcatattaggagcatcactcttaagtgttgaaaattgccatggcccatttatcatcatagctgctttacctgtagcaaactgcttctcaacaccaggttgatcccaattaatacattctttacttaaagacccatctttaagtaggtctgtccacaattgaagtgattttactacttctggagaattaactttttctacacttcctcctgaagataataagaaaggcataaattggaatgtaccttcttcgcttttcacagcagataatgacaaaccataaaccccatcttttgtgagttttttcgcagctgttctaagctcatcccatgtttgaggaggagtaactcctgcctgcttaagaaggtcctcattataaaataatgctaaacaattgctatccataggaattccataatttttgccgttatacattgttgacttccatggaccttcaaaatagttatctttttcatcccagtctttaactttatctgttatatcttcaaacattcccattgctgcaaatgctgcatgatcaggattatctataacggcaagatctggtaggttttgtgctgctattcctactgaaaactgcttctttatgtctgcaaatggtacatattcatttactacttctactttatcttgagacttattaaatttatcaactaaattattaaatgattttttttcattgtcgttataataactccaaacttttagtgtaaccttcccgttagtattgctagcagtttgttgagtacttgatgatccgcagccaatcaaacctaaagaaagtacagcacttattattaatgatatggtttttttcaatttaatccccccactttaaaattcatatcttcgacataaactcatttagataaatgtaaacatatacaatacaagatgcgcatctgttactatcattatatttcttacaatactctaatccaattccaaagttttaagaaaagtgtaaaaaactaatcaattttatttatgcattgtaacgtattttcctgcacaaacacctgtaacgcttttaaagactttacaaaaatattttgggtcattgtatccaaccctcttagcaatctctcctatttttaaattactgctaacaagtaattccttggatttatttattctgtattcctttaaatagcttgtaaaattagttcctacttccttataaaataatgtagaaagatattcaggggtgacattaaggcttgctgctatattttctaatgaaatgcattctgcataatcatttattattttattaatagtcttatatacaattaagctgtatgatgcctttgaatctttattatttaattcagatactatatttattatattttttaaaatatcctctatttcacaccagcttgtactatttttaactttttctaatatcctttcattattaattttaataaacaactcataattaatatctttcattatgttaattattgaaatcacgaaacaatctacaccatctatgatactatctggatgatactcacctgatttgcaataacttaaaaatttatttattaaattacttaatttaatatagtcctgctcaccaattgcagccataattaactgctcaatttccttaggatatttaaaagttttagtgcatatgcttgatattgcattctcagtaactataacatcctttttcaataacaatgaccattttaaattcctgtttatttctttcactttactcgcaacttcatcaattgaaattaatttagaaagaccagcaacaatgcagttttcaaattcattatcacgaaataaattgaataatttcttatttaattctttttcaatatttacttccgaatcctttgatgcaaataagattaatatttcattattatattcatactctataaggatatattttaaattttcaatatgcttaaacaaattatctaaacattcttttaataaattatatttttcaacatgagtattaagtaatttggctacaataacataattaaaattatattcatttatcttacctgaatagtgttcatatattttgctaatctttattttcccttctatcatctctattatcatttgttcaaaagtcattatgttaattctttgataactttctttttctatttccctatcaatatctttttctattttttcaagaacatttttcagatcttcaactgttatgggctttaataaataatcagtaactccaactgaaatagctttcttggcaaattcaaattctgaatacgctgtaataattatcatcttaacattaatttcagattcattaagctttttaagcatctctaatccatttagtccaggcattttaatgtctgttataactacctgtggttttgttttttctattatattaaaaccttctaagccatcatttgcttcccctataacatgataattttcgttgattttaggtaataattttataattcctcttctagtcctaatctcatcctcaataacaacaatgttcatatacttccccctgaaaacctagttatttttaatatatccaacatatattatgaatagaaactctaagaaatatcttatataattattttattttaggtattctaatgcaaatacttgtccctctgccaatttcactttctatattgaacttataataatctccataatatattctaagtcttgatattacattttctattccaatatgttctcctttattaataatcttagcttcacttacaaggctattaatatattttactttctcactatccattccttttccattatcttttataaaaatcactatatccgattccttcatttcaattgacacttctaaaatacctccagatgtatagctctcaaagccgtgtataatagaattttcgattagtggctgcagcataagcttgtgtattttaaattccagcacttcttcctcgaacttaatttcagttttaaaggaattatcaaatctgctttcctgaagatataaatactgcttaagccattgaatttcctgtgaaaaagaaactattttattactttgattaattgaatatcttaatatttgacctaagcttttaagcattttactaatttcatactcctccttttcaattgccatccaattgatacagtcaagagtattatataaaaaatgcggattaatctgagcctcaattgctcttatttctgcttctttttgcaattttactgcttcagaagttaaattcatctgaattctaagtttttcaactaactcattaatatgagatatcatcttattaaaggttagtgcaattatagaaaactcatcagttatatcctcctctattcttacagataattctcctttctgtgctttcttcattgccgcaacaatttttcttatggagcttgtcaacctatttgaaactagcactataaaaaatatgaaaaagagtattactataacaataactataataataattcttatgctcagatttacttcggaaaacaatttattttcatcaattatattaacaatataccagttacttattttcaagctcttagtgtttacaattagtgaatttccttttacaatatgagaattaattatggtattgtttaggtcctctgaatttctatctttcttattagctaaataatatatatttttcccaatataatttctatcttcataagatactattgtaccttcattatctataattaatgaatatacgttgatattattggcatgcagatcatctgaatttaagttataagtcttttgtaaaacgtcttcatttatgcttatacaaagaactccgattattctgtcacttgtaaagtcaattatatttgaatacacattgatcaaattatacgtttcttctaccaatggctgcgtatatgacattccgctccatattgttccgtatctgctagtctcatcttcataatcatttttttcaattatatcgtcataccttttccagatatctggtattgcatgtccatttattctgttatatgaagctatcttatgatttttattagtacgtatatcaatattaacaattcccagttttgaataagcgtaaacagttaatttgcctttaatatcattcaatgccacctgggtatttatatccatattacttccaatatcatatttatcaatcagttttgtgagttcatcatcgctggcaatctgcatatctaaatcttcataagaagaaagagtagtgtttatacttttagcagattgtgtaagactaaaatccattagccttgatattttattttctattttattagtagaataataataagaaaatatctcaatagataagattggtaatatggaaataatcagaaatgatgatatcaattttgttttaaaactagtcttttttatatgattaagtccaatattataaaagcactctttattattcataacattcatctcatttctacgaattatcagaatctatatttaataatttatttctaaaatataaaaagatagactatttactttttaaatattctatctctaattatataacatttttatttaaattacttattttaccacaagattcatatattgatattaaaatccctatatattaaaaaatctttcatcctgctaatacaacaaatatagctgtaattcaatcctattcctaagtgatgctagtatagttttatggacaattcttgaaaaaaatcataattaggtaatattatctgttcttgcaatgtgcatattccattcattcaaattccacctaatatctaatcatatgtattatcagacaaaactgcataatcatcttcagatacatttataaattcacctgaaagttgtttttctttattagcttttgaatctgcacttatagcactagcgctagctgaaacagtcgatacaatatctattccattaagaatagcatgtcctgctgcaattcctccaccacctgctgataatactcctccgcctacaaccgccattgttgcatttgaagctgccactccatgtaacgatgatattgccactccggtacttgctgttccagttaatgcggttacagttgttattgtacctcctataacttctcctgtaagcagacccactgctccagcgcctacagctgctccaattttccttgatttttcaacatccagtccgccttcttcagctatcaattgtgcaacttcagcacctgttttagctcctatatctattgctttatctacaccattacctagaaattcgcctcccattttagtgcattcataagttacttcacctattactttactattctctctaaaactttctccaagcttataatttccgttacagtctgcaatgattccgccaatctctccagtagccttaatacctagttcaagaccttttccagcaatagcacctgctccttttacaattgatcctaataaactcataattaaactcctttaaaacttatttttaaaaacttaattaataattacactctaaaaatcaaaatatttttcacgtaaatatagtagcatctttctattagttgaataagtagcgccttcatctctatggtcattactgttatcatcatattctccagcaaatgataaaaaattatagcttccttctatataatatgattcatcacaaatcattaccttataatgagaattcacttttttcattttgaatctttgaccatatttttcaaacttattaattaagtcatttgcaattctatcactatttaaacttctattatttctttgtgaactatagctactatcttcaattccatatcgtatttttatatttactcctcttttaagtgcattttctatctttgttatcaattcttgatttactacataattatttagccatggactagctatgcataaactaattttagttttatcaaaagacctcataaattcttcacgtatttccttattagctagatggcgcatttcatctttgatacctattattccaatcatatcatttattttgctttcactggcttgtacatcttcaattatatatttttgattttcatatcttatatatacatcagctaaaccttgtaatttgtatgtggctttttgctctttaagttctaatcttagctcatttctgtctaattgacctataatattttcaatctttataatctcatgtgtcttcataaaacataaagtatatataactttgctttcagtcagtatattttcatatctggaaatcctcttttcaagctcttcctttttattataaatatcatctatagtaaaattattacctgaatctattcgcttatcatagctctgtaatttacctttatacattttatattcttgcctatcaaaagcttcaaattgtttctttaatgattctattgaccaatctctttcttctttttttattttttctatttctttctgtcttattcgtttcaattcttctttagaaagtgtaatattattcttcttagcatttattaaagttttgcaagccatcccaagtccaaatgtagacatatatacaagtggtactgtagtaattgcacctgcaaatggaattatagtcttataaagccctaatataacttgctgagataaaactccaaaacctaatgttcctacaagataagctaaaatttctttcactgttgcatcatttgtttttagccctaatactttactcaaatatgtaaccattacaacttgaataggacttaatataaataaatccgcaaatggtataggttgaactgcaactattccacatattaaagctgtagcatttacaattatgttagctttagtattagaactaatactaggatcttctactactgattctaatgtttcttttagttcaaatgatttttggctaattaatttttgtatttcagaaagccctgacattttttttgatattttattgtcttttaaaaaattcatattcattttaaatccacctaacaatacataaaacttttcttacattagataattcttctaaattaattttgtatagcaaaaacattcagttgtatgatcattaaccattcctactgcttgcataaaggaataacaaattgtgctcccaacaaatttaaaaccatctttttttagttgcttactcattttatcacttaattcatttgaagctggaacttctcctatgcttttccacgaattaatgataggcttattatctacaaacttccatatataattagaaaacgagccacactcttctttaattttcagaaatgcttttgcattagtcacaacgctttcaatttttcttctattacgaacaatgcctttatcttgcattaattgttccaatttttcttcagtatatttcactatcttttcagcctcaaaattatcaaaagcttctttatagttttctctttttttaagaatggtccaccagcttaagcctgcttgagctccttctaagcacaacatttcaaatagtttcctatcatcatatacgggcactccccattccttatcatgatattcaatgtataattcttcttttgtcacccattcacatcttttaataatttgaatcacttcctactctactaaatcgcaaaccttgctgtatttttcaccattttttacataaatctaatctttataacacgtaacagtgttaattaatctatattataagtatattttaccataaattaagagcctacattacgtaaactcttatcatagatatctttatatttttctgaactcaaatcttggaaataaaaatattggaattgtataagtcttgtttgcaattccaccttgcgttaccccttttagataaactgcaaaattaatttttccattagctaatgattttgttatagttttacctggattcttaccagccttaacttctattccgtaaacatgcccgttttccctatctctatagacaaaatcaagttctccatcaccatagatgccaaacataggaactgtagatattttatccaaaagacagtggtaaacaaacgtttcatttaataacccgctagattccgatgctaataggtttgcttttttcatcacataatttgccatgccaacatctgataagaaatatctttgtctcttctttatattggtaaattcaaaatctataagcttatcacagtctttaacaaattttgacgtgtaaaaccattgaagtactctattacaattttccttcgtgatattacttgaatattgtttggttattatttgctgtaattcttccgtataactgctttccttaatgcctttttttcctctagctagaatttcaattattgcgcttatacagtcttcaaacactcttgtagtcaatatatctccatcaaaatatcttgaagattcttcacaaaatactcttaataatttttcaaacaaatcattaatattttccttgtgatttcttaagtattcacatactatctctggataaccgccaacttctaagtaatctttatacttatcataaaatatatcataatcctttttatcgccatctccatacaaatctaatgactcataagcttgtgttaaattaagcgcattaataaattcagtaaatgataatggctttatttcaaggaaatctacatcacccatcggagaccaaaactctttctgcataacaactcttcccaaataacttccagtcatgataaaatgtgccttaaattcccttgcaaattgccttatcatattataaattttataggattcttgtatttcatctattataattatgcattctttactatcctcaaaattgttggaaaatctcttaaacatctcttttaatgtatttgttttttccctgtctagttttcctgatagacgctcttcttttattatattataaattgtaagtaagtcctctcccgtttcttccaacagatttatatatattaaatgcttataattttctcttgcaaattttttcactaaataagtttttcctacctgtcttgcaccttctactaatagcaccttattattgtggttatttttccactctaatagttttttgtatgcatctcttttaagatctattatttgtttttccacgtttctcacttccttacaattcaagctataatcttgtttagtctctactaaattatatcctaaaatttatttttcaataataattttaccactatttaaatataccagcaatcatgtgctcctcacttttttataagtgtaaattgttaactttttttatttgtaacctcttaacttttttcatttttaacttctttacttcataaattcttaaaaagttttatttgaaaacataattattgttaaaaaggtttatttcagcctttggaacctttgctgaaacagtttctcctgctactttaaaaaaaggtttctttctaactaagtgctttgtgataaatatgcgtatagctttaccacattacttagtggtagacgttttatagccactgaagaatctgaatttctagctgaagaaattcaagcatttcttaaaccctatataaaaagggcagcgtagaaaatttaattcctacactgccctatatatttcatttaaattattatttttttaaatgagctccatttgtatcaataacttctttataccagtaaaagctctttttctttttaaccgagataattatatgtatcccgctatttgttctcgctttagtaattgccacaactgctccgccatatattctgctggataaggcattgaatttacaatccaccattccattacaccaacagcagctgaagcaacatattgagtcattatctccttgcttatattttcattgcttccagtcatgtcaagatgctcttctatactcttaagagccattgttaaaatacgttctctaaaagcaggcatagctttgttattgagcatatttgaatagaaaagagcatgcttttctatatattgaaacgtctgaagtagcgaagctttggagtcaaaattgctgctctctccatctgaaaggcagctgtcacataattgatttaaattagtatctatacattgattcatcaaatcaaatttgtcttcatagtgcagatatacggtaccacggtttacatttgcctcttctgcaatttcgttaatggttatcttttcaaagtctttttccgacatgagtttaataaaagcacccataatagcctgttttgatttttcaatacgtctatccataaaaatatctcctttatgtacctaatgtgcttccttgtacaccggtttattttataataatcaacattcatatgtattttgttcattaataaacaaatcccattgttttaactattgaattgaactaacttaattgataaatttattatattgaacaaatgttgaaaaatcaatatttgttgaaataatgaaaggcggaattaatttgaaaatattttattttactgctacaggaaatagtttatatgttgcaaaaaagattggtggagaattgtattcaatacctcaaatgataaaggaagctaaatatgaatttgaggatgatgccataggatttgtatttccttgtcatggattcggaatggcaaaaataattagtaactttataaaaaagtcaaaatttaaagctgattacttgttttcaattatgacatatggtggtaattcattctctggattaaggcatatggagcttgtggccaaggaatctggaatcaagttcaactatacaaatgaaatactgatggttgataattttcttccaacttttaagattgaggatgaaataaaaaagaagaacccagaagtaattgataaaaaactgagtgaaataatagctgatattgcaaatagacgaaattctcttgtgaaaaaaggaatcgtatcaaatactctatctaaatacggccgtggctttgcagataaaatcagtaataattttgcagctaagaaatttattgttacggacgattgtactagctgtaaggtatgcgaaaaggtttgtcctgctaataatattaaagttaataacaagcctgagttttctcataaatgcgaagtatgtctagcctgtatacatcattgtcctcaaaatgcaattcacttgaaatctgagaaaagcaaagctagattcataaatcaaaatgtgaagcttaaagaaataattgcttctaataatcaggctaaataaaaacgcagaaaatataattaaggctgattatatcttcataaagtgtcttaagaaacctattaagacttaacctagatttaaagagaaaagaccttgaagactataacctttgggtgcttttaaattacccgtgcgcccctggtatgagggtgttgaagtactcttatcaggtggcttgccttatataccacttacctgtaaggaacattaaatatacttgatgtttcctattagacatttctatatacataaaaatatattaataactttaaatccataacttagttaatttgctaggtagtcttatgtttggtataatgtgcacatgtaattttacaataatgtagttaagtaatacttaatggagttttaaaccttaagtttctactttacatataaggcacaatcaaaaaaaataacaaattcatctgctaagcatattttccaccatgctacgtaagtagattgctataataggcccgctatgacaacaatctaatttcttgcctgatgaaaaataatcatggcattttgaacttgttattttctttcatgtgtctaaaacaaaactttaacaaaaggggataaaaaaatgaataacactaaagagcatttttcaaatgttataattaaagggatggggacttacttagcagctaataaaattggtaacgagccatatattgaacaattcaaagagtatgatgttgacttagagcatatctttgaagctctaggaagaaagtataggtatgtatcgactgatattgaagaaacaacaataactatggcgattaaagcagcagaaaaggcacttgataatggaaaaatcagtgtagatgatttagatgtaatagtatttgcatcaaacactccagaatacttaagtccaagcaatgcattattaatacagaataaacttgatgcaaaaaatgttaaagtagtttttgacataaactgtgattgtgctggtatgacactcgcaatagatacggtaacaagactactaaaaactaataagagatataaaaaaggtcttgtagttggaagtgttatgatgagtgcttatggaagaaaagatgatgtttctacagtaggattttcagataatgcttctgctgtagtattggaactagttaaagaagatattgaaagaggatttatagattcagttcaaattacagatacttcatttgaaatagattttgttagaaaccctcaaattggattctctaaatatttaagaactgacattgcagataaagaaacattaaagttttcatcacatccaaagggaggcacaccatatactaaaatttggacagacttaacactagatttatgtgaaaataacggactaacaattgatgaactcgactatgttttattatcacctctagcaaaacacacatgtgaagatttcattcaatcagtatatccagacacttatgaaaataaattcacattccagagcgaagaattaggatacctaggtttaaacagtgaaattttccaattggaagatgcgataaatagaggtatagtatcagaaggttcaaatgtattaatgaatggtactggtgtaggaattacaactttaatggctttatatagactttaataatacaatatttttccacatcaaattcattctcacaacaaaaaagcagtagtttaattatcattaactactgttttctataagaataagagcttaaattatataaactctcattaaaatccctataacttaaatttaattttcttgaaacttaataatggaatccatttacaattacattattcataaagtccccagcctccactgtactgatgaggtgactttccttttgattctataatcataggtttcaaaggaactggtacttcttcatttatttcggcaagctccacattaaatttccattcatctccaaaatcaaataagtatagaagtctttctcctttataaatatttaaacttgctatagttgtagtttctgctacaggtccttcatactctgcatacttacagtatattccttttcttatgttacctcctataaaaaatgcatataagtgatcattatcaaattcaaaagcttcttgaatggcattatgtaaatccccaaaagtatgcttatatgctaaatttatttttctccatacagtttttgataaacttactttaaaagtatacgttcctcctttatttatcttactttcttctactgtatttttaacagtgttccctttaaagatggttttaaaaacgtcaaatgctttttcatttttgttagttgtaacttttaaattataatactctagtaatactggaacatcttctctattccaatactgaatagcctttgttagaagtaatatacttgttttaatcccaaattcatttggagaaaaactttttatcgtatcttcataccttgtttttgcaccattaattaattctagttcaccaaaactaaagaactttaaatgatgaaaaaatgcagccccagttgaatacattacatttgaaatatccatttcatcttttacaattatatttccctgtttagcactagctatctcagctaaaatattgtaaaaagctgctatattatgagttctatcaaattttgtttcaaaatcatatttagtccaataagtttggagtaagaaaacatatttttcatcttcatttaaattttgaaagctttctaatttatctgttttaaagagtcttacttttcccttttcatcgttagcctttatataaagcttacttgcaagaactagtgaaaacatcaagtctattgcaaaatatttatcttgattataactaggatttattacatcttttttattttcaaggatcatgtttagattatagcactcctttctgcctaatacttcctgagtcgctgagagtataggcttttcattctctataaattctataaatttttcaaaatcgtttattgcactgttaatattactcatttttattgatccatcctcagtttttatatttatttgtgattgaatttatttatcaggttaaatttgatcatgactatataaaattattttcttcttttaaatccatattcctttttcaatatttcaatatttctaatacaacataacaaacacttgtcgattcaattatattaattaaactaataattctttcagggttatcagtaaatggataccctttgcagctttctggtttgcatgcttcaatttcacagcttccatcgtttcttaaaaagaacatagtatttgcttaatttcatatttcccaaaatattcttcaatatacatattcataaattctttttctgaaatctcaagaaaatctgcaactttttagaataaatcttttccactttttctttgtcaataatttctatataaagctcataaagtagttgtcaaatgataactatattgttataatatttcttaactaataataattatcaaaggggatttcaaatgactaaaaaaaataatagagaattaattttaaatatggttaacttttatagtttatttaatgttgagtttatagatctcattccagacctaactaatacagaaatcactccccttctttcaaaaatactgaattttattcattttgaaggtactactacagcatcaagaataagtaaaaaattaaacatatctgtaccaaatacaagcagaagtattaatgctttatataatcttggttatttgataaaaaaacaagatgataaagataaaagaattgtttatttatcactatcaaataaatcattaaatcttatttcatctgttgctgcggctggagaggatatttttttagaacgatttaatgttctttctaatgaagaaatagctgagttatctcaatcactattaaaagctcagaacttgattataaaaatgcgagatttatatgaagataagaaaactatgaaataaatattaaggagatggtttaattatgtttataaaaactataaaatcaaaattaattattctgataagtatattactcttagttgtaagcactggatttggaattatttcttatattaatgcatctaacgctttaatatcaaatattacaaagacattaccagaaatagctattcaggcttctaatactgttcaagctaatttagataatcaattaaattcactggaagttactgccaagactgcttcattgaacaatgatactccagataaattaatgaccattttaaaagctgaagcaaagagaaatggtagtattaaaatgggatacgctgatatgaatggaaacattatatatactactggcgaacaaactaatataaaagatactacttattttaagaaatcaatttctggagaaaattttattaatgatcctgaagttaatgaaggcaaaactgcaatgacaatgatatattcggtaccaataagaaatgatgactcaattacaggcgtgttagtatcagttagagatggaatggaacttagtgagatgattaagaagatctcttttggtaaaactggaagtgcctatatgattaacagtcaaagcaatagtattgcttataaggattcaagtatgccattaaatcaatataattctataagagaagcagaaaaagatcctagtctaaaaggcatcgctgatatgcaaaagagaatgatagctggtgaaactggtttgagtttatatacttttggtggaaaagaatcttatggaggctttgctccaatcgaaaaagaaaaatggtctgtagttgttattttagagaaatctgaacttttatcagaactcaactctctaaaattctcaatagcccttacatctatattatttttgattattggaattcttgtaatttatattatttccaatagactatctaaaagaattagatatgcttctaattccttaaatatattggctactggaaatttcactaataagataaatgaaaaatatttatacattaaagatgaaattggtgatattgctaactctatgaatactatgcagaactcaattggagatatgattaaaatatctaaggacagttccctaataattgatgaaaactcaggtaatttatcaactatatctcaaaacatggtcttatcttctaataatgtggcgaattcaatgcaagaggtagcaagtggaattaattctcaagcgaataatctaatggaaatcactacaatcttaaatatcttcagtagcaaactcgaagatatagtaatgaacactaaagacatagataaaaatacaataataatgaatgaacttgcaaataatagcagctcaagcatgaagttattaatggatacagtaagcagcataagcatatcctttaaaaatttatctaataaaattattacttttagcagcaatataaaagaaataaataatatagtacaaatcattaattcaatagcagatcaaactaacttattagcattaaatgcatctatagaagctgcaaatgctggtgaagctggtaagggttttggagtggtagcaaatgaagtaaaagccttggcagaacaaacaaagtcttcatctcaaaatattagtaaattagtatctgatatatctaatgatactaatgtaataaaagatgatacaaatagcatgaccacagagcttaacaatcaagttagcattataaatgaaactataaactcatttgaaaatataattgatgttattaaaaccgtaattccaaaagtacaaactgtaaatatggcaactatagaaataaataaagaaaaggatgatattcttaataaaattgaaagtacatctgctatagccgaagaaatatcagcttcatcagaagaaatatctgcttctactgacgaaatgtacaagctatctaatgaagttgcaaaagcttcttctaccttaaataatatgacaaaaaaattaatcgctgagcaaaataaatttatagtttaattattatgaatatatttaatttaacaaaatatttggaggtgtttattatatgattaaacctttatttttagctcatggttcacctatgatggcaattgagcaaagcgtgtatactaaatttttaaatgaccttggaagatctattaatcctaaagctatagttgtgttcacggcccattggacaagtgaaacacttactatttctgcttctgatgctatatatgatactgtgtatgatttttatggatttccagaagaactctataaaattaaataccctgcacgaggttctagcactattgcaacaaaaattaaaaataaattaataaattcaggtattgatgtaaaaacagatctaacaaggggcctagatcacggtgcatggactcttttaaagcatctttatccaaaagctaatataccagttgttcaagtttctataaattatactctatctattgataagcagattaaaataggcaatgcactaaaagaacttggtgctgaagatattttgattcttggaagtggaaatacagttcataatctaagattggttaattttgatagtaaggcaattgattcttggtctaaagaatttgatgattggttaattgacaagataggaaacaaggacatgaatgcccttaataactataaaaaatatgctcctcatgctaacttagcagttccaactgcagatcatcttgtcccattatttatagctttaggcagcagctcagaattaacccctagagttatatttagagattaccaattaggaaacttaagttatctttgctatgaattttagacagatttgcattgaaactcagcattctcagtttagattttagttcttttgataagaggatttatgatttcatttgtcattaatcctcttatctgttttgtttgatgcttgctctcttaattgtaaataaaaataagcgcaaatgtataaccacttattcatagtctacatttacacttatacataaaaaaaataagagcctatttacataagctcttatttttatcactaatcactagtttgataattcttgcgttcccatgtatttgctgtttccgtagattacacctataccaaccctagtatatttttcattcatcatattttctctatgacctagtgaattccaccattgattaaataattcaactgggtcaaaagcgttatatgcaatattctctcctactgtagtataagtatagcctatcgtgtctaaccagtttgtccactttgtttcgtctggatttgtatgattaaagaaattatcttaaatcatgatgtcactcttatatggtgtaacttacactaatgattaatgttttccttaaatttatattttattttaatttaaattgattaataatttcttctaaacttaaagcactttctgcattattgttagatgcagctaatatagattcatttttgctgcttacatcaataatatttgaaacaatattagcagatgatttagctacttctgatactgaaatagcaacatcttccatactttttgaaatttgatccacagactcagaaacactttcagaaacttctgcaaagttacctataatctctttaaaagtatctccatcctttttatactcagcacttatagtaattagtttatcataatccttaagaacctctttttctataaatactaagatatcttgtgatgaacctgaaagttttccaactgaagctaatacagcacttattttattctgaatttcagaaactgttagcgatgattgttcagcaagttttctaacctcttctgctacaacagcaaatcctttaccagcttcccctgctctagcggactctattgctgcatttagcgcaagtaaattagtttggtctgctatcgcatctatactttttgccatttctgatatctcgtttacaacttcaacttccttcaatgctttttctaatccaatttttgtttccctatatattctctctgcattttcccttgatttaatagaatcattattaattgaaactgctttttcttgtatattcaatgcaacatttaatccatcttgtgcttttttagctgttacattgacttcctctttaactgtagcagccatagatgtaacttcttcaactgctgctgatgattcttccattcctgctgatatttcttctgtcgccgctgatatttcatctactttagaacttacctccgaaaacattttatttgttaattcgctactctcaaggatacttttacttttatctttaataaacagcatactttcgttcagtttttcaactgcaccatttaatgcagttacagtatttcctatttcatcgttagcaactactttcatttgtatatcaaagttaccatctgccaattttcctgcacctttcataacttcttttacttgatttatgacactttttctaattaaggtcataaataaaattcctataataatacttactactaataatataaccatttgttgtttagaactatctgttatctctttagaaagttctccttgtgatttcattaaattattttgagcagctatcatattttctatacttaaaagtaattcatcttgtggtttctctatattagtaatcatatcttgaagttcttcggttgatactccagtcctcatacctaaattcacagcttcatcaaatgctgaaaatgctgattcagaattcttctttatttccttaaatatttctttgcctttttcagtataaactaagctgccaagcttatcttcgttttcattataaataattctattcttatccagtatttttttttgctcattcatataattcatatcattactaattgatatatttcttatactaattgcaattttgttaatgctccctctcatattatatgcagctgatactttctcattttctacatcaattaattgatcaacagttccattaatttggcttaatctaagtatagctagtgaggctactcccataattagaataatcattaaagaaaatgctataattagtttgtttgataacttaattttactaaatcccatcactattcctcccaatatttttctcaatacgttaattatactttaatttaaactataatgtctattgtatttattctattttttactttttccgcatatcattgacactttatcatattattttctcaaatttttgttacataattaattaatattttatatttcaatatcttatttccaatatttcacttatattttaataattctctaaccctttacttttgtaattaatatatatacttacttataaagttacaaaggaattttatattattaaagtactgattgcaccataataattgatttaatgtaaaggtataaatatgatatttttagtatatatgttgcaatgcacatttcacaattcacaattacggctgaaattcttgcaatatttttagaattgtggcgaagaattaattttccaacgtatatataagtaattaaataaaaaaagcgcaaatgtataactatttatttatagcctacacttacacttatacagtacaaaataagagcctatttacataagctcttatttttatttctaatctttagtttgagaattcttgtgtccccatgtatttgttatttccgtagattacacctatgccaaccttagtatatttttcattcatcatgttagctctatgacctggtgagttccaccattggttaaataattcaactgggtcagaagtgttatatgcaatattttctcctgatgtagtataagtatatcctattgtgtgtaaccagtttgtccactttgttccgtctggatttgtatgattaaagaaattattttgaatcatgttatcactcttatatcttgcaacttgtactaatgtattatctatagttaatggctgaagacctgcttctgttcttttttcattcattaattgaagaatcttatcttcagcagaattttgtatgctgattgaataatttgtcggcaggttaggtagcccctgtacatttactgatgttgcatttgtaccactttttgaaactgcatctgtattaccaacattatttccattagaagtattcataagtgaatttgtatttaaaagattatttatatttacattattataatcgttaacatttgaattaattgtagctgcagatactcctaatgatgagaaactccctattgttgtagctgcaataactgtagttactattcttcttaaaccattctttctcattagtttttctccttctatatgttttatttgtccttatgatctatatatatatatatgttgcatttaacaattcacaattaaggctaaaattcttgtaatatttttagaattatgatgaaggatcgtttttgcaatatatatatgggcaaaaaatatctttaagcttttgttgttttcgagtaaggacatgtctctatcttatcatcttttcgacaataatcaacacaattttcgattgctatattgttttaaacgatattgtcttaagtttgctttagtatgttattgtatgcttctttatacaccataaggcacatgaaaataaataaaaagtccaaagttgctattattatttttcatcaggcaaggatgcaaattgccctaacagagggcctattagagcaatttgcagacgaagtatgatggaaaataagctgacaaatagacttgttatttcttgaatgtacctaatattatttaatatctcaaaactccaaggatactcccctatgttttcttaataaaaaattcaaatgtgttttacatctagctaaaattattgaacctatgcatcctaaaaacacttttatagcatatttcatcgcacttttttatgtgaactatttatagtaaatttttaaatcaaatttaaagatcttacctattatttatttttaaaatacctatcttactaaatataattacaaataaaatgcatgaaatcataaatgaagttatactatagcccatatttgaagatggattatttgcgcacattccaattgaaaataatgaataaggaaaatataggcctaacccttttgcgctaaaagccattcctataatccctccgagtaaggaaatgcctattggcactgcaaaacttcttattataagtgataatgcaagctgaatggatacaattgtgctgcctgcacataatccctgcaaaagccatagaaacatttcacttggaattggtgttgtgaatccagcaaattttccggaaatataaaacaatattccaacaaaaatttgtgtaaaaaatagcattttcatagctgtaagaaactttgataaataaatgctgctaattctaacaggtgatgttaaaatactgttccagttgttattcatattttctaatctacataaatatgcacaataaacgcctattaatgctggaatgcaaaagtaacaataaaatatagtatgttgtgtccaaaggctataccactcttctgttaatatctctttattactcaaataattaaaggttcccatgaaagctgaaatacatggtataatgaagaatgcaatccatataggtgacctgtaaagttttatttgttcagcttttagcgtacgtaaaaacatatctaaatctcctttcttataaaaagtttttttccaatgtcgtatagaaaaatagtacctaaaagtaataccaaaaattttttaaagggaatgccactccaataaaagttaactatccgtgtacttttatcccaatccattattactggtgacagtattgcgtagtagccccataatacgtatttagctgcattctcaaagaataatgaatatagtcctaaaaacataccagctatggaaactccaaatgcaattacttgattcgtaaattgtaatgacagtatcagttgcaatagtgttactgttaagttaactatcaatgtaaatagtgcataatagtaaaagtacccaactggtatttcttcagtaattcctcttagcttgccaattaaaatcattgttccaacttgtaatagtgttgttataaacatataaaatccaccacataaaaatttggctgcaaataattgtttacttggcattattgattttaataatttaagattatttcctttatgctcaatatcgcttaaacgtgatccgataacagcagctaacattggcataaaaacacagttaatcgttgaaaatctatagaaacaatttctccatccttgagataattcatgagcattattatatttcatttgccataagccatacattagttgtacaatcaccacagctagtacagtaagtcctactttacggcggcgtattttgtaaaattccatgaaaattgcctttttcataaactcactgcctttcctgttagttccaagaaaatatcctctaaacttttttttcgttcttccatacggagaattatgatcttattttcataaaataacttattacattttataatgaagtcatcggagatttgtggtaataataaatactcactctcaacttcacaatccatgccataactatttaagataattcttgctttcgcattatctaaagttctaattgcaagcttatggttacttctttcatgaagaattttcaaattatcctggaagatcaattctccatggttgattattccaagagtatcagccatttgatctatctcacttaagaggtggcttgataccacaactgtcatatcatactttttaggaagtgaacttattaattccctcatctcttgtattcctgctggatcaaggccatttgttggctcatctaaaataagtaatttaggaaaattaagaagtgcagctgcaagtcctaatctttgtttcattcctaatgaatattcattcacttttttatttttttgattatctaatctaacaatctctaacactttatttatatttttttctggtacatcacgtaaagtttgtacaatctttaagttttctactgctgttaggtgcccataataacttggtgattcgataagactgcctacatctcttaaaatttctaatctatttttatcatttgctactttaccaaacacagttatactgccttctgtcggtttaactaatcctaaaatcatttttaatgtagttgattttcctgcaccatttggccctaaaaatccatatacagtatttttaggtatttttaaatcaacatctttaactctatatgcatctttatattttttactcaaattattagttataattatatgttccacttttaaaaactcctttcaaaatttgctctaggcacatcaaactaatatctatattgcaacatcaagctcacatttaaaattctagtaatgacaactcttgattaggacaaaatgtagaaattcaagtgcaacatatatagcaattgttttcttatgcgctttacctttacttctcttaaatgataaaatatctagattacatcctgatgaaatctaccttacatttaccttaagaatctcaaaattaattctcgaaattttagtgttagtgtataatgattatagctacttcttgaaaattatcggtatatcaattgataaccgtaacttataacttataatggataactcaattgataaccgtaaattctaacttatatattgaaagaaaggtactttaacatggacaatattaaagattgcaaaatattaattgtagatgatgaactttctttgcttactatggttaaagatattatgcttaaggaaggatttcaaaatgttttcaccgcctcaaattgtcatatggcaatggaaaaatttaaagaggtaaaccctcatgctgttattttagatgtaatgcttcctgatggagacggtttctctcttatacaaaagcttcgtatgatttctactgttcctgtactgtttttatccgctagagatgaagatgaaaatagactcttagggcttggactcggagcagatgattacatgactaaaccattccttcctagagaattaatcctaagacttaacgctattctaagaaggacatataattcaacaattgttaaacctgaagaaaagccaaccttttatttaggaaacatttttattgatatgaatagcggcactgtaaataaacaggaagaagagctgactttaacagccaaggaatatgctttattggataaattatattccaataaaggaaatatcgtaactattgatgcattatgtaaagctgtttggaatgataatttttttggatatgagaacaccttaatggtacatatcagaagactcagagaaaaaatagaaccagaaccatctcatcctaaatatcttttaactgtaagaggtcttggctataagcttgtaccggaggttcagtaatgaagggaataataaaaatacttttacgatatattctctcagctggaggtattgcaataatactattaataactaactttttaatcttagcttcatgggtagtatcatatagtacatattctaatacaaaatataatatatcagaaattgctaatggtcttagaaaagaaaatgataaattcatattatctgaagaaacctccttaataattacaaataaatttcattgggcaatgctcttagatgatagtggaaaagtaatatggagtacaaacttacctgaagatgttccgttaagctatacagcttcagatattgcatcttttagtagatggtatttagatgattaccctgttcaatcatgggagcatccaaacggattatttgttcttggtgatagtaaaaatacaacttggaaattgcagctgcaagtgcctgaaaaagttatgtacaatagtactaaatggatatcaactggattgataataaattttacagttgctatgttgttagcatttttacttggaattcgtttctttttatctcttcgccagattgtaactggaatgaatgatatggctgaaaaaaggcctgtttcccttaaaactaaaggtgcatttagagatttagccctaaatataaataatacatctaaggaattattaagacagcagaaactaatagaaaaaagagatactgcaaggaataattggataacctcagtatctcatgatatacggacccctctttctatgattatgggttattctagctctttagaagataatactagtttttctgaggaagaaagaaaacaaattagtatcatacgattccaaagcgaaaagataaaacagctaatcgacgatttaaatttgaccgtgaagcttgaatatgaaatgcaaccattaaatatacaatctttttttatttcagaacttattagaaaagttgtcgttgggtatttgaataacttatatgataataagtataccctagaactttcaatttctgatgatgttcaagggtataaaataaatggtgatatgcggctgttcgaacgtgctcttaacaatattataggaaatagtataaaacataatgaaaatggttgtgatatcttcattgagatgaaaaagcaaaataatggttgtataattgaaattaaagataatggaactggctttgcagaagatgttttaaaaaatctaaatgcttctaatgaaatgcctagtggtgtatctcatggccttggactttttattgtaaaacaaatcattgcggtacatggggggaaaacatattttaaaaattgggaaaacggcagcagtatagaattgtggatacctgaaatgtaaagttattttttactttccatggaagataatattaaagaggtgctgttaattgtaaataaaaataagcacaaatgtataactatttatttatagcctacacttatacagtagcaaataagagcctatttacataagctcttatttttattattaatctttagtttgagaattcttgtgttcccatgtattttctatttccctctataggtgtagcatttttaccacaaaatcattttgtacttttaaggacaatcccttccttaaatcccccacgttcttctcttttcttatctctagctttaataagttcttcttcactaaaccctaggctgccagcaagtccaaacaaaacttccatgatatcagctaattcttctaaattcttatcttctaagaattcattaacttcttcctttagctttgcttctaaaagctcatactttccttctttagttgcgatttctatatcacattctcttccatctgcttttattatttctgggattttatctcttactaatttattgtatactttcattaattctcactcttttcatatatatttacattaattacgtaaagcatatttcaaccttttatttacaagatcaatgcaaaaatttttattccagttaatatctgaccagcgcttcatttcttcatattctggatgattaggatttgacataatttcaagaaatttttcataacctggtataccacctacatcctctggtggtgcattttccactccctctatacaaattgaataatttttatcatagtcatgtattatagaatcaactttaatttcatgttcccagttatctccaaaatcataattatatattattgcatagtcctttttcatataatctttaataaaagtatctgagtctattgctactgtacattcaccatttggataaaaatcatcttcatcttcactagctacatttagtacattttcgccttcttcattaataacgttaaattcatacaagtgataatttttccatccaaacgaaatttgaagaatttcatggagttctttaaaattaatatctattgggataattatttttctttcagcacagtaagatcctaaatctaacttaaccactaacttaacgccttcacatttaactatattttctccgtaattttcctttaggtcttttagtaatagctcgtgaggctgcttatagttatatttgtctatctttataatatcagcattcaattttcttgtgattatggactgataaatattttctaaatctaataattcttcaaaataacctacaacttcgcatgctttatttagtcttgaaacataccttgaaccatttgttttagaaaaacatattgtaccagcatcactcaggtactgctctataatctcttcttttattttttcactctgaaaacatcttctaacaccttgtaaaataagttcatctatcctcttaaaatcctttgctttaagtccaaagagaacaaatccaaatctactgctgttgtttactaatacaactgcctttcttctcttgatgttaatcaaattagcactccacgaaaacaactccttatcttcataaggcttttcaacagttatccccatttcatcttgtaatttttttgtgcattctataaacatacgtacctccttaaaaattggtagtttctttgatttttatagaaacattattcatctatgttgcgatatatattaagactgttcattatgtatggacgcacaatagctagaagcacatcaatttgattatttttcccatccctaaaccaagaatatgcagctccataaatagctgagcatgtcatagctgaaataatctttgtattaatgttatcttccattctgaaagtcttgtctttcaaaaatatgtttcctatggtttcttgcagcatcttttttatcttttcatcaacaatagtaccaatagatttagaatcccacccacatgttttataaaaagtcactatgtaattgtacgtaagtattattaactgactacatatttcatccgtaaactcattagcattcataacctcttcatgatacatcttatgaaaaacctgttctgtgatttcttctaacaaatcatatttatcttcataatgggcataaaaagtagctcggttaattgaagctttttgtgcaatatcttttacagtaatagaatcaaatcttttcttttgtaacaaatcactaaaagcttccattattaattgtcgtgtgcgtaaaactcttgggtcatcctgatttaccatccattaatcttcctttctaaagcatcaaatcttaaaatctgttgtttaagcaacttttcatttaatctgctggttgtaatgctaatagcaccatattatcataatatcatacacatgttgcttagacaacatacacacaattacttgagaggaatgataatattgaacataaaacaaaaaagaattttaatatttggagccggtgtagtcggcagtatatatgcacttagatttgcacaatcaggacttgacatcacactattagctcgaggagaaaggcttaaatcacttaaaaaggatggattaagatataacgataatggagttataaagcaaatatctatcaagactatcgagaagttagaagataatgatatctatgattttatctttgttccagttcgttatgatcaggcagaatctgcgctatcagtaattaaaaataatcatagtaaaactattatcacattaactaacacaataggatatgaccgttggcttgaaattgtcggtgagcgattgctcccaggatttccaggcgcaggtggagatatgaaagacggtattttatacgcccaatttggttctgaaaagcatcaaggaaccattttcggtgaaataaatggacaaattactgaaagagttaaagatcttgctcaaatatttgaagtatcaaatttacattatgaaatacaagaaaatatcaaagcattccatatttctcatactgccaatgctatagttatcaaacatttttatacaaatgctggtatgatggatgtagaggcagcaaaaagtaaagacactttacttaagattgccaaggaattgaaacaaaatatacatctggttgctaaagctggaattccagtaatcccaaaggaaacaaagttaatgggcaaattatccgaagatgatatcatcgccatgtatcgcaaaatgcttagtaatgattttacgattgatgttttgcttggaaaccatgctataagcgcaaaaacagaaatattacttttggatgagctttttcacaaaaaagttcattaagccatgtcactatgttaaaaatgatttattttattctttattaatcgcattttcatctaactatattatatattgagcgaaaattataaacaaattttaaaaccaagaaaaagcactacttagatctctaaagacttgtagtgctttttccatattctaaattttttcaataattcatttattacgagcttttcatttatctctttatatttgtagtatcaagtattatgtcacatttgttctcaatgtctagttcggtaaagtaatgttcttccagtggaatccatttgtttataaaatcctgaagtttttcttcaccattacgttttagaattcgttcatgctgcactttgggatcaatggttataaaaattttataatcataataatcttttagtgtaggatgcagactatagcttccttcaactatagttaaattcttaggttctacttttataggctgacttagctcccctttattgcataaatattttctatatacagcaggctcgttgttttttagtggatttaatatttcttcctgaaatctttcgtagtgtacatttccaccaggttctgctagtcgttcttttgttttcattcttggaggaaggaagaaatcatccatgtgaaaaaggctacaatcaaacccttctgcaagcattgctcctaaggaactcttccctccaccacatcttccatcaatggctattactaatttttcattatcttttagtaagttcttaatttcatcaaatacatatttatattcattataaatatgtggtttacgttctttattcattatttcctccaatatttaaaggcttactttacatgaactcctgctaaagacagagatttcttcattactatacatgttcttgtagctttaatattattttattactataatatatttgttcaccatttatgactgatattcctctaaatttgtatcttttctatagatattttgtaattcataattcacaattacggttaaaattcttacaatatttttagaactagtatgaagaattgtttttgtaacatatatattttatatttttctagctttcaatctaattcgcacataatctgcataccatactccattttgatatagaataggttttaggctttttaccgtctcatcaataatttcattttttaacgagtcatctaagcctttaaaaggctgtataacaaacatttcaatccaattcttcattccatcatcacctataagtgcggttttacgatcaaataatgctgcatatactgtttgtagtccatgctttttaagaataggcgtatattcatcaatagttggaaaatagaatgttctcttatattctaatccccttgcttcaaaagccttttgcaaagatgaatgaattgtttctgtgcatccgtatcctccaaattcacatactaagcttccgtttatttttaatccattataaatactatctagcaatccatcttgattatcaatccaatgaaaaactgcattagaaaatatcgcatcaacttgttcatttaaagtaaacttcactgcatcgtcctgtataaatgttagttcaggataatttcttcttgcaatttctagcatttctcctgatgcatccataccaattacatctgcacccatatctgaaatctttttcgttaatgctccattaccacatccaagatctaagactttcattccttcctcaatatctaacaaatttaaaacatcttcaccatattgatgtacaaactgaaaatcttttgtataccctttagcattccacttaatattcataaaaacacctccattttaaatatacctgacattaaaaatagtatatcaaaacagatatcataattgaaatgcatattaattatactttgtataactatgatttatatagttatacaaactaaaatctgaaattatggatataactcaccgaaataaggattatgctgttgttccagtttctaaggaaattataatggatgattctaagatcacaagttgcgcccaagatgctagcctcaaagacgagcgctcacagagaaagttcgaagaacgaaatatgaaatgcccacagggaaagttctgcttaccaaatgtaaaatttggagcatcacttttcgattctcactttttgaactagcatacttggaacaacttttaatctaagaatcggagccatcaaattcctaatgaaacatttcacaaaagcataatccttatttctagttagaatatatttcataacataaatttaacttatgattaatttatctatataaaattgttgtactactcattatttttaaaaattctcctacttatataatataaactttaaaaataattcttcattataattctaaaaatatttcaaaaattttaatcgtaattgtgaaatgcacattggaagttataacatttatatataaattacccaagcaaaattttacataagccttttaggttttaatttccatctatgatacatatatttattatatgaaactgctttattattagtttatatagatattcagcttattagattaacacacctacaagactgctaaaactttaagttcatatctccactagaaatcataaatatatttgtaaccacaagggtcataatatggagaaaacattttaaaataagctgttaaaggttcttgctgtaggttattccattttagcttgtgaagtgagagtcctaaattttattttgggttctcgaacttcctcagcgaatgtaatgagtcgagcttccctaggaaagttggagaatgataaagtggatacaactgctgcttaaaaccttcagcgatattttcatagcttttcggaatcaaaatatttatgatttggtaagtagactagggaatcacttccctaacccctctcagaaccgtacgtgcggatttcccgcatacggctccccacattataattcacagtatatatgatatatcttcttttaagttgaaaatattaacatatattttagctttaggtattttgaagcactcaaacatagtgtcaaaacttctccagttataacttcttttctgacttcttttgtttagccatttaaaagttagttttcttactaaatatctgaaagttgcgagacttaaactgttgtcagtgattccgtaatacctataatatcctattagtctctgtgtcagtttctccattaataatgtgagcggcactgttctattattctttaaccattcattcaatctcttcatgctagctccaaatttctttgagctagtcttcctcttaactctaaaacttccattctttctgcaactgcagaagtgtgtaaatcctagaaaatcaaaagttctatctttatatgattctaactttcatgctctcttgaattttctatcatagtaggcattcttaccgaaatataatattttagttttatcttcagctacctgcaagttaaatttgtctaatctgtttttcaatgcttcatagaaagctttcgcttcgtcttcatactgaaaacagcaaacaaaatcatccgcatagcgtactatgtaagcctgtcctttacacttctttttgataaagttattaaaccatatatctaaaacataatgtaaataaatgtttgctaatgttggagatattattcccccttgtggagttccttcatatactttataaaactttccgttttccattattccagttttcaaaaatctacctatatatctaagtaagttcttgtctgcaatcctgtgttcaagaaatttcatcaaccacttgtggtcaacattatcaaagaatcctttgatatcagcatctacaacataattcacattcttttcagataaatatacatttaagattttaagagcatcatgacaacttctattttgtctaaacccaaaagaactatcaatgaaatcttgttcatatattgattttaatattttattaatggctaattgtacaactttgtcttcatatgccggtatacctagaggtcttttcttgtttgaaccagacttatctatgtatactctccttacaggctgcggtctatatttaaaagtcttcattctaattagtagattatcaatattattctctaagttagttccatattcttcctttgttaccttatccactcctgtagccttatttccgctcagttcataatggcataaaattagcatttccttgttaactaaatgcattagtgatgtaaatttctctttaggattatttccagctatttctgctatcctctcaagttttgtgtacattttttttcctcctctgtgtgagaatttctgtttctcttttcaaggtctataatatgttacacccttccctccatggtcattactcatttcttcagtactatggtgtaatccgactactcattatcatttgaatacctctgatttctaatcattgttttccatactctgaagtcagagaataatgagtcctcccaagttgacgtactatatcaatgtataccatgctacaccttaaaaccacgagaaagcacagatattcttgcaataatgattatctatgttctgacttctaatttaccgatattatcgtcctttctgactttgtgataatttcgtggctagtagtttcagcattcgcttgcggcctggtaccttgtttgtctacacttaacttattacatcgccataataagcccaagactaactaatgactggttgctggcctttgtcatgcaggattcccacctgctatatagtaataatgaggaaggttagccctcattatcttttacgcccttgcttggcgtaccggcaagttaacacataaatctagttttaaagttgtatatctataactttatttaaagcagttatataatttaaattggagatgaatctaaattatgaataacatgcttttaagtcctgaattttggtttattattggtattccaattacttttttacttggatcattagctcactttgcatatgattggagttgtaaatcagttatagtaggtatttttactcctgttaacgaaagtatctgggaacatttaaagctttctacctatcctacttttatttggtatatactaggcattttaatatttcgagataaagttaacttgtatatctggctcatatgctctgttatttcagttattactagctgtattgttataacttgttttttctatacctacacaggcgctcttggaatacaatcattatttcttgacatattttcattatttttagggctttctatagctcaatgtttatctttgcatatttataaatatgcaacattaactatgcttcatttttatttatctattataataggttctttaataataatttgttttactctttttacttttcgtcctcctaaattgccgatttttatggaccctattactaagaagtatggaattcattaaaacaaatcctctatatggatcagcttaattttaaacggaattttaattaataaacttatgttcaaactctgatgcttccataggttttcctattaaatacccttggatgaaatcacatttaagctcgtttaagattctaagctgttcttttgtttcaattccttctgcaacaattttaatatctaagctatgtcccatatttattatggatttaataatcgttagatttttatagtttgtttccaaattcattataagagatttatcaatttttattttatcaataggcaatttatttacataattaagagacgaatagcctgtcccaaaatcatctaatgatatttttattcccatgctcttaaattgttccaatatgtttataattgtttcaaaatcctccatggcctcatcttcagtaacttctaggttcaggtatttaggcggaagagaatatacctctaatatatcttgaacaagtgatacaaattcaggttgttttagttgagaataagaggtatttactgatacactaaattcatgtgagccaatttcattccattttttgcactgtatacaagcactttctaacatccaattgtctattggtattatttctcctacacttttagcaataggaataaattctacaggcggaataattctatccccttgcttccatcttataagagcttctgaatttagcactttcattgactttaaatcaataataggttgataataaaccataaattcattatttactaatgctttatttaatttcatcttcatttctaatttatcaattgctttatgttccattttaggtgaatatatagcaaagtcataaccaccatttttcttaacttcatacatagctaaatctgcattgttaattaaagtatccgaattttctccatgctctggaaatatacttattcctatacttgctccaataattaaagattcttcattataattaattggctttttcaattccttttgtacttttatagcaatttctttaatatacatgtcagactctatatctttcaatataattataaattcatctccaccaattctgctaattatgtcctgtgtacctatagaacctttcaatttagatgctacttttttaagaactttatcaccaacttgatgcccaaaattatcatttatatttttaaaatcatctaaatctataaaaagtagtgcaaatttcttatctttattttttaatagctcattaatattttctaacatcagttttctatttggaatttctgtgagagcatcataatatacataatgacgtatttgttcttctgcacgtattttatcttttatttgatctataagtttcgaattttttctttctaattttaaagtgtatttcttttctagctctgctattctctttctttctgaaatatcatgtatcaaaattacaatacctagtttatcgtcatattcatcatatataactgtgcttgataattcacattcaatatgtcctttatttttttgttgtaaattaacctcaacatttttcacataactattttctattatagtattgaaatcaagattttcacaagatattaaatcgctgaacatttttccttctaattctttaaatttataataagttatatttgatgacgcttcattacaattttggattgcaaaattctcatctaaaataaatattgggttcttaacagtattaaaaatgtattctgataaatacttcgaagtagttaacataaatctatgcttacttattgcatagcaaacgccacctaaagctatagttccactcaaaactgctgaaggaaagacaagaattccaaacataggtaaaataatatctgttaatacccctatggtaatgcttataaaacaggtccataaaataattttattttgctttcttatcctattcttttttgaatatcttcctctattaaatagcattacaagacctaatacataaaaaattatagaacatatgctgtatgcaatttgaccaaataaatttggagctacatcaatccatccataaggtcttctaatcatagatgaagatggttcaaccataatatttagcataaataataatgcagcaggaacatgggctaaaattattataatccgattgtatttattttctttctcattatttaatacaaatgcaaaatacagccaataaccagaaaaaaaacaataaccaaaaattgaaactgccctccaaaaaaacgctatatttatatcttcacaagtcaacatcattgcatatccaagtgcccaaacagcacaacacatgcttaaatttaaaaatatttgattagcttttgattttttgtccatcctgtatccgtatatacctataaacgaataaaaaacgcaacataacattaatgaaataaataaactaatataaataaaaccacctccggcataaaatattttaattaatttttactttatataattgttgagaaactataacttaaattttatacgtttctaataaataatctcatatttcaacattttctgtcattatatcattttattcttaatttcataaatattcaagttctgtaaatctatacattgcaaaaattttatctttttaccaataactttcatttacatacataaatacctattaattagacttttagcagtgcatatataagttctaaatgatatacttacaccttataaaaccattcaccttgcatcatctcatagttaagataggcttttataaattaaacttttaagaatatatatattcctaaaataagattacaatacgttaaatgccataaatatagaggatgccgatttttataaacttcagcatcctctattactaattctatttcttaagcaggattatttatcttctcaaatatatttcacattttttattggtgacttgaaaactctcgtgagtttttcctaaactctgttggagtcatgccccttttagccaaaaattgttttataaaatatgtatcatattcaaagccagtggcacgtgcaatttcgtttaaactcatatcagtatgagtcaatagactctcagaaacctttaagcggtatgctagtaagtagcccattgctgtgcatccacataaatcctgaaaacttttatttaatgacacacgatttaaatgcgcacatcttgttaaatcttccaaggttattttatcagaatagtttatatgtatatattctaaaactaaattaacaggtgatttttcgctatggtggtttagctcttcaatcaatccaagtatttgtattaagtatttttttattctacacacccaaagcgaatcactttgggcatatacttctgttcccataataaaaaaccactcatataatttcaaatatattttctcatctacagcatataccctagtatgaattttatcttttccaaaaagtaaaagaccagtttttatttttagattagttgacatatatccagtagtttctgagaaatgagctgtattaaaaaaatctggatggaaacaaaatgattgtgaagatacattttgtttttcaataacgtctattttatcctccatcgataaacaaagaatacttggagcgacaattttcacaggacgatcatttagttgtaaattcatgcttccactcgtaataaaagttatagttaaacgttccttataaggaagatttacaaagttttcatttgcaataaattctatatatacagttctattcttgtgacgatctgcttgcggcataaacattcctccattgggtacattaaaataaataatgaattcaaattaccatttatattttcattaatcaatagcaaattctaagacaaatgctaaaaaatccccacaccaaaagtcgacggctccacagactcttgtcgattttgttattgttcttttacaaatagtatagttaaaagcttcatttatgacattgtatcatattttctaaatgatagactattattaagaatcaaagaaagttatatgcaaataagtctattaataacttacacataacttatatgaaaggagaattattatgtctattaaaaaattcaatatccaagtatctgatgcggtacttaatgatttaaaatacagattagatcatatacgctggcctgagcagttagaaaattcaagttgggaacgaggtactgatataaattatttaaaatcacttgtttcatattggaaggatgaatttgactggcgtgcacaggaaaaagaattaaaccgtttttctcatttttgctgtaatgtagatgggatagatattcacttcatacatgaaaaaggtaaaggacctaaccctaccccaattatacttactcatggatggcctgatagtttcatacgttatcaaaagattatcccacttcttactgaccctgcaagttatggtggtgatcctaatgattcttttgatgtaattgtcccttcattacctggttttggtttttctagtgcttcaaaacatagtggcatgaacaattatcgtgtttctgagctttgggcaaagctaatgactgaaaaacttggctacagtgagtttgctgctgcaggtggagatatgggttcaggtgttacaagatacttggcattaaatcatccagaacttctaataggaatccatctaactgatattggaattatcagagatcttatgatatcagatgatacaaagctttcagaagatgaattgagttataagaaaattgcttcagaatggatgtcaaatgaggcaggttatatgtctattcaatctacaaaacctcaaaccattgcctatggactttctgactcgcctgtgggcctagctgcatggattatagaaaagtttctcagctggagtgattgcaatggggatttaaataaaatccttactaaagatgaacttcttactaatataatgatttattgggtcacaaataccataggctcatcagcaaatgcatattatgaaaatacacattcattgccaccaattggacacatagatgtaccaacaggcatggctttattcccagctgatgtattgctgccaccaaaggaatgggctatgcgcaatttaaatatcactcgctggactacaatgcctaaaggaggacattttacagccatggaagatcctgaatattttgctgaagaaattcgtacattctttagaacttataggtaagcttgaacttatatgatgataatacgaaattacatacatttttattccacaggacttatgaaattttcgctagaaagttctaagtaaaaggttgtgcccattgctgtatgctcctcaaacaagttgatgacaagcagcaaacggaacaacctttcactaacaactttcaatagctcaatttcagatgcctgtttcacaaaaatgtatgcatttctggtataggtcacataaaagtgtaataatgatgaataatagttctgcatataagtgaacttatgcataattctgatttattgaatatatagcgtctgacctaatgcatatgtgaaattcctaaatttgatgcatatgaatattcaatttacaaaattgttaaaactttaagttcataacttcagcagaaattataaatacttccatagtcctgcgaaataacaatgtttctactttagaggattatcgcataagtctaaatttaatgttagatacccatacgcgtaaagctaatgagtattttaacagttaaatcatatattaacagttataaaaataataaaaaaagtcattcctaacaataaacacaaaaaagaaaggaatgacttttaatgaaaattaatttaaattcattaagtagtatggataaaattaagaaaattattaatcttttttcaaaaagattaataacaaaaaccgccgtgactactggatttacacaaagaaatagtaaattggatggatttacattttttaaagcatttacttttggagtttatagtcttgaaaatccgtcattaagaaatatagcaaatttttgtgaagatataaaccctaatttgaaagtgtctaggcaagctatagaaaataagctcaaggcaggttcaaactttttaaaaactattcttacaaatattattgaggataaaataattaagagcattaaacacaatcacattgaaatatttaaagcctttaatgatataaaaatctgcgatagtagcttaatcaagctaaatgactcgttaagagattcttataaaggtttttcagaagataagtcggcatctgaaatgaaaatacaaacagtatatagtttcaaaagtaagcagattgaaacatttgaatttgaggatggcacaacaaatgataattcatatatgaaaactttggcggacaaaattaacactaatgaacttctattagttgatttaggatatttcgataaaaagtgttttaaaatgcttgaaaagaaatctgctttttttcttagtaaaattaaatataatactgcactttataaagaaaattataaaaaagggaattttgaaaaagttgaaatgattgatttcttaaagaaatcgagcggtgttatagatacttatttatatgttggaatgaaacaaaataatagagaagaatttagagtaataggaaaaagattaccagaagaaattgtgaatttgcgaatccgaagggctagagaaaaagcaaaagctcaaggaagagccccaaagaaaattgacaaggaactaatgagctgggttattatgataacaaacattgaaaaagaacaagctgatgtggacatgcttcttgatatttataggttaagatggcaaatagaactcttatttaaatgctggaaaagctacggaaagattgaccatgtcaaatcagcaggaattgattacttaaattgtttgctttatggtagattgataataactttgctaataaatacagtttattctgaattgtattttaagtataaaacagaagaaaatagagaaataagtatgcttatgatatattcaactataggaagtaaacttaaagaaatatgccttaatttcattcctaaaaaggaaaacttggaaataatatatgagatactagtaagtttgggaaggagctgtaagcgagaaaaaagaaaacgccaaactacagagggaagattaatgagctactctcttccccctacaatttggtgattactggttaagctttacgcgtatggttagatacctatacctttttaaattgttatacatataaaaaggtacaaagttttcattgtaaaaagttttatttgtatcaatttaagaatcttcctttaaaaaaaggtttatttaaatcttcgaaaacatgtttcatttaaacaagttttaaagaaaccaagtaatatttttaaaatttttcacttttttcattttaaccatttatatttttcctaaaactaaatatttcttaaatgagagctattttttaggataatatcttaacttaaaagtgctcttatattaatatcttagggggattattatgagtttgaatagaaaaaaatctaagaataaatttaattataaagatgattttactgttgatgaaagcgaagatgttagcatttgcagcttatcatatggcgagccaaaaattgaaggtaaggttttaagaagtttttcttttgattcttctgatgaacttgttgaagtcttgcctgattctcaatcttctttaaattcagcggcaacaactcctaaacagactataaatcctaagccatctcctgctgttacagaattagcttatgataaaacaaatcttaagtcttctagaaagaatgttgctttagatgaaagaaattcaagtggtaatccaaacggcaggactccacctgttgatggagaaatattcgatatggttagaacttatactttacgccgctcaacagtaagaattttaagtaaaataaaagctattcacacggatgacaatgtttatttaaatactatcgttgatgaagctatacgctattattatgaccacctaaaaagcaatcttaagtaagaatttagtactatatagatagcctaactaagacttgaacttatgaatataactagccgaaataaggattattctgttgttccagtttctaaggaattatgatggatgattctaatatcacaagttgcatccaagatgctagcttcaagggcaagcgctcacagagaaagttcgaagaacgaaatataaaatgcccacagggaaagttctgcttaccaaatgtaaaatttggagcatcacttttcgattctcactttttgaactagcgtacttggaacaacttttaatctaagaatcaaaaccatcaaattcctaatgaaacatttcacaaaagcataatccttatttctggttgggatatatttaatagtataaatctagcttataattattttatctatataagttctaaaagaattagagtgaatttcgagacaccacacaaaatcctctataacactttgttccttatgtcctgatttaatgatttaaatgatttgattttgttacttaaactttttaagctttccttaacactaaaaaaatcagcttaccttaactttaataaggtaagctaattttaagcttctaaagcataatcaaaaaaaataataagtccatctttcagacctattattttcattcatatgcttaacaatttatagctttatctccaaaaatcatttgactatttttaattgaccttttatatcaaaaacatcttcttctgttttatggagtttctgtttaataagtttgacgtctttattaatagtaataaaatgctctttagttccagttctaaattctgttaaatcagcggtttgatcgtatatagagtcaactttccctttgatttctgaaatatctgatttcattcctacaatatcagacttaatttcagtaatattagattgcattttattctgattttcaataatctgcattaataacgcttcaattttatcatcttccatttaaacagctccttgtgggtaatataacagtacttattatacactattgttaaactacataaaacaggatttttttctcaaatagtattattctattaataagtataccctatattttaatagccattccatcttccataaatctataaccgtatagctcacaatttcttatcatagctccatttgaataaagacaataatctttatcattatacttaatccatcctgtctgcataataccttcattattaaagtaataccattcaccatctatcttttgccagtctgttttcatagctccatcgccttcatctccaagataataccaattattattttgaagtaaccacccagatttcatggacccatcttccaaattacctaagtaataccacttatctccactcttcttccagttataaagcatccacccatctccatcaaatagataccatgagccatttattttctcccatccatttcgtgtacatgaaccatcttcgtgtttataccaccatttattattttcaaggcgccactcaccccttattgtaaaactgcaaagcttgtccttaaaatcataccaccttgaccaattattatcacaaaaactgtttggacatattttacgacttgcatcataatgccttacaacattattaattccaatgtcatatttattcattagatatcttgttaaatctacagtattcataactgtatcttctgaaggttttccatccgcttctaagcacatttctattcctaaagaattgctatttgtaattccatattctcctttcccatcgccacaatgccaggaataataagtatctgtatcaattatttgaattatagaatcactgtcaatgaaaaaatcagctgaagcatttctatttcctcccgcaaaataatcatgttcattttgagcacttgcacctggatcaccagtatcatgaataactatatagataggcatagagcttcttaaagatctgttgtaacttataaattgttcatcaatatttttcataaaatacatctcctattaactaactttaatataaaacttattttctccagccaagtaaccgctcttctagatcctcgtaattatatgttcttgcttcgaaattattgaatctaagctttggcttttcttttgagctttcaaattccatttcctcataagttttgggatagccttctttaagccagtttttgagtattcctgtaatatagttaatatcatatttatttctctggattgctatatttattgccatattaatatatttttcctcatgtatagataatctttcaagaatccaattcaaagttaagccttttatatttacttcatattcttccaattccctgattaatttaaagcctttatcttttaaatcttcataggacctagagacctttcctaaactgacttttgattctttagaaacattaggagcatccaggcagcttacaccactaattgttttatcttttaccctactctttaaatctttctcttctttatctaattctaaattctttttcttattttcttgttctctcttctctttctgttccgttacattagaattacaacatcgtgacagatttagattgatagaaactttttcatctgtgatatctgaatccgaagaatcttcattaccacttctgttcttaacaatatttttattttcatggtcatctttacttttaatattatatttattttcagcgttatctttagtactgtcttcaattttcatactataacagctttctctatcaatttcgtcatcatcatttacttgatatccatttttctttcttgctctacattttcttgttctttccttattgatttctcttacctttttcattccttctatattctgatgtttttcccaattgcatattctaataatattattctcataaatctcaatcatcccaaaggattctaataaattaaacactttctctacaagattttttggtctattgaataatactgaaagcatttctttagtatatggaacattttctgtcaaatagattaacccattatcatttacctttccagcctgcaaaagcagtctaagccacaaatatactatgagatctctctcttccatagcatcaaatagcctcatcttttcatcttcaaacatacaaatggctattttaatccaatcaatacctctcacaaagctcgtcaccccttagttaaatttacatatttactaaaattcaaatttatatcttcaccagaaattacaaatatttttgcgtagaaaatatttataatttcggtaagtctaaatcaggttattaatttacctattattggtgcaataaaatttcttttcttcatcaattattttatagattatcttctcatctctaagtacttctttaaattcaaattctttatcattaataagacatgcaacatagcatttgtctgtttttgtaactctcatattatgttgacattcaagcaatacattgtcgtctataacatcttcaggcgcatttccactatatattatgcaaagtaatatggagttttccccaacaattcttctgtcaactttacaatgcataaaactatattcctcatctgtagctatttttaattcttttctcaccttttttccacttcttattgtaaattctttgcaaataatttcttttatagtctctgaccagtaattaatctctttttctttatgcgattcatctttattttcgcactttttttcaaacttctctaaatggagctcattaatgcttttacttttattcacacctaaaataatccctatttcattaccataaattccttcaaaattcccattaaccatatgtcacctcataatataatttacaaagtccatttgttaccgtttacaaaggggctctgtttaaaaattttattcatgtctaaacttggataaaaattgctttcttctaaaattatttaaagtaatgcctcctctaatttcattaaaacattattcacatttctttgtaactttttaattttcttgttatattattcaaattacttttttcacttatatctattcttccaaaactctctttttttccccttatatctatcccttttatttccattttgtaatctcattatacatctctaatttttcttgtcaataattatattggtacttttttacatattttttattgctttttgttttttctacttgtatacttattttaaagtaattaattcaatctcttttcttttattctttatttctctacattcacacctaagataaagctaaaaacatcttgttacacttctctattctttaatattctcatataaattttaaaaaaagttttaatttttttctaaaaagtgtttatataaattccttttaaccatatttctattatatatagcatttttattttagggggaattttatgtgaaatatgaatatgttgaaaatttagtttctgaagcaaaatccggtagctccatagctaaagaaaatctaatcttagagtttactccattcataaggtttatagctaataaaacttttataagcggctatgattatagtgataagataaatgaatgctttgctactcttcttacttgtatttcaaaatacaatttaggtaccaatcgttttgctgcttatgctatgaattctatacaaaagaatctaaattctttaatacgaaaaagtgttcacgcaactgaatacaatggcatgtctatattatccctggatgatgatcttgaaaattacattgccttagatatggatcctttagatgaaactctgtgtttaactgctgaatacgaagatctgacttctgctataaatactaaattaactgatgaagaaaaaattctaatatccttcctttatttcaaagaaaatactctagttaactatgcctattacaggaatgtttcttatatgacagcttcaaaacgcaagaaaaaagtcttaggaaaattaagaaattatatgaattcggaggtaatgaattatggcaattaatgatttaatgaacttgattactaatgtgggtttccctatagcagtttgcgcttatttattgtttcgactagaaaagcagctatctgagctttcctcttctatcaataagttaaatactattatttcgactaaattgggtgtagttatagatacatctccaaacgcatcagatgataagttaaaaataatttagtgctgctcttttttaaaatactatgaaatatttcatggttctatgcagttcctattattcacaactattactcacaaactttaagcgttattctctcttttatattccataaaacaaatgtatagtattttgccctaaactatcacacaaatctaatcattaagtttaatgtatatgttgcaattcacaatgtacatctcacatttcataattccggctaaaattcttgcagtatttttagaattatggtgaagaatcattttcgccatatatatttataaaatattttcaaaaaagggtttatatttttccaattcacgcatatttctattatgtaagcaaaattttgacacatgaaaagataacaaattaaagatgcattaggaagttcctatatgcagcatatccgctcttctttactaaatatattttgtgtaaagtaaagacaatcatctttattcatgacaagctattaggtgcacatattgcttagttatgacacaaattataaataaatattctctgttgttttttcaatgtgaaatttaggaggtaaaaattatggcagtaacaaaaaatcttgaaactctatccctaactatagaaattcaaaatggtgtggataaaaccggcgacccaacttatgctaagaagacttttgcaaatgtaaaaagtgatgtaaatattgaaaatgtctatgctgttgctgatgctattaaaggaattctatctgctaaaacaagatcttatttcttaaatgaaacttcatctattgtgcaaggctaaaaaagctcaaattaatttaatctttaaacctatatgttcacccatttagggtattcaattaaaagaaaatcaattcaaattctaggaggttttagttatggaacatattttacttatgtcgtttttaactgaaaatggtgaaaaatctaacttaaatataagtggtgtaaaacctgatcttacacctgctgaggtaaacacactcatggatactattgtttccaaaaatatttttagaaatgataaaggtgaactagtaaagaaatatggtgctcacctaacagagaaaaatattactaaatttgaaattactaaatagttaaattccaaaacaaaaagtaagctgatcctttattttattccttttacccttcattaataaaagcgttctagtttactaaaagtgtttaacactttatagaactagaacgctaattaataacttatgctattattctatatttccgtacttatcttttgcaagctcaataaattcttttagagcttgagagacataccgatttttttggtatccaatagctaatgtgccatgagttttgttgtacttcagatgataaagattaactccagtaattgtattcttatcgaatattaaatgtttattattcattagagtttttggatagaaagtaattcccattcctttaactgaaagtgccaatactgtttcaatgctttctgtctccaatataatattgggttttatttctttttcattaaacatttcatctgcaataattctaactctatttttagcattaaccattagaaatgggcaatcttttagtaatgtaatatccatatctttttcaagtttttgttttacttccttataattgttaggaaaatattttactaatatattatctggaacaaccatcagaacttcttcattacaaagtggaactatctctacattttcaacattaaaaggtaacattcctattattaaatctacgtcaccttttaataaagctgcatctagttcctttgagtttccttcaagtaaatgtaaattaatattaggaaacttttcattataataaggaagaatttctggcaaaaaggctcgtcctcttgtatgtgaagctccaataaacaaatctccacgtttgaaatctttaatatctgccaattcttttactgactgctcttttaaatctaaaattcttacggcatttttcactaaacttttccccgctggcgtcaatgttaatggcactgtacgattaaataattcaacccccaaatcattctccaattttgaaatatgagaacttaatgactgttgagaaataaacaatttttttgccgcttttgtaaaattcagctcttctgccgctgttaaaaaatactctaaattaagaaaattcatcataacgtaacactactctaccttgtatttaatataaatatattgcatctatagataaaccaattataagctagatatatactgtaaaatatattccaactagaaatatatgcataagttttaggcttagttgctttatctataattctacttgattatttatcatcaaacgtatttactttcctatgatactatcctcaagctataattagttaatcttctaaaacattctattctcttaaagctttctagaaattagtacgcttaataactcttctattttatcatatacttctttttccttgcaatccagagttttccctataaatttatttaatttagtatttctccagtagagttttaaatttataaataaattctttacatattttagaaaaataaatttctgttttaacaaataatctttcgttttctagctcctcgttttaaatatcatctctaagtcatattctttgcttaaagattcttatatacttctgctaaatgctttgttaactttgtattttctctataatcaacctgacaatcaataattactggcacatcttgcttaaaggcttcctctaaaattggtattaagtcttctgacttttccactctatatccttttgcatacatactttcggccattttaacaaagtctggatttgtgaattctacatagcagctcttgccgtactgatcctcttgtttccattttattaacccataatttctatcgttaaaaattaaaacgacaatcggagtacctatacgaagtgctgtttctatttcctgattattcatcataaaaccgccatcaccaacaattgctaaaactttcttactaggatttattaattttgctgcaattgcacctggaactcctattcccattgttgcaaaaccattagaaattatacatgtgtttggctcatagcaattatagtgccttgcaatccacatcttatgtgccccaacatctgaaaccacaatgtcatgggggcccataacttttctgacatcacttaaaattttctgaggtttcattggaaaactttcatcctctgcatagatttgatgttcattaaccattttttctttgatttttagtgcgtcaactggctcttcttttctagatgttcttctcattatattatataaagcatctgaaatatcaccaactacttcaactattggctgataaagcttattgatgtgtgatggtcttgtatcaacatgaacaatcttagtatctccatttacattccattttgctggtgcatattctacaatatcataaccaattgtaactactaaatcagcatcttcaataactttatttacataatctttctgcggaattcctattgtccacattgaatatatattatcaaaaggaattattccttttgccatcatagtatttattactggaatttttaaattacttgcgaattctgttactgcttttgcagcattattccgaatagctccacttccagctaaaataactggatttcttgctttaaatatctcacttgctgcttcttctattgatgctaaggctgcatattcttttggtggaattttcttttctaatggtttttcacaaatacttacaggcatctttgaaatatttacaggtaaatcgatatgacaggctccaggtttctcgctttcagcatatttgaaagcaattcttacaatttcatttactgtatctggtctaacaatttgcttacttctcttagtaattggttcaaacattttacaaagatccaaaaattgatgcgatgttatatgcattctttcagttccaacctgtccagttattgcaactacaggggcaccatcgctatgtgcatctgctactcctgttactaaattagttgcccctggaccaagtgttgataagcatactcctgctttacctgttaaccgtccatataaatcagccataaatgcagccccttgttcatgacgagtcgtaataaacttaatacttgacccttcaatagcattcattacttctaagttttcctctcctggaattccaaaaatatattctactccttctgcttccaagcatttaactaacagctgtgctgtatttaattgagctttttcatttttttctgtccccataataaacatcctctaatctatatattttagtattatgcttaatgcattaatattttctcaaacatcatacttcaattaaaaatgtttttccaacaacttttttcctatttaattacaataaaatggttgtgattaaatgaggaaaatcaaataatttatttaacaactgtttagttgtagttctacaataaaaaatttgtttgaatgatgtttagaataatgataaaattgttttggtaaatatatttaattttaaataaattcttgaaaaaaatttattttttatgtaaaattataattaaatagtaagacaatggagtcatttattaaaatggctctttttttatatttattctttttaacttacagatgttaataaaaaacttaatataataattattttaagggggaatagtttatgtacaaaatagatttaaattcagatcttggggaaagctttggtgcttataaaattggctctgatgaagagattcttaagtatgttacctcagtaaatattgcttgtggatttcatgcaggcgatccgtcagttatgagaaaaactgttaaaaacgctctactcaataatgtatcaattggtgctcatcctggtcttccagatttaattggtttcggaagaagaaatatgtcactcactccagatgaggcatacgacatggtaatataccaagttggagccttatacggatttataaaagctgaaggtggaactatgcagcatgtaaaacctcatggagcattatacaatatggctgcaaaagatggaaaattagcaatagcaatagcacaagcagtttatgatataaatccagaattaattttatttggtctagcaggaagtgaatcaattaaacaggggcgtttagttggccttagaacagctagtgaggtttttgcagatagaacatatcaaaatgatggttctttaacaccaagaagtcaaagtgacgctatggtaactgatgaaaaagaatctatagaacgcgttatacgtatggttaaggataaaaaggttaaatgtcagcaaggtaatgatataggtattgaagccgaaactgtatgcattcatggggatagtgctaaagctttaaactttgctcttgaaataaataacactttaactaattcgggtatagaaattatctcttttgagtaatttttaaattatatgaagaacttatatttatatcaataaaaaattatattataagggggctataatatggaagaattaaaagaattaaaagaaagtccaatcacggaagaaataagtgggtttaaaagtacttctaaactaaaatcttatttgggtgcaatttttctaatggcaatcacagcaataggccctgggtttttaactcagaccacagtatttactcagaaattaggtcctagttttggttttgtaatattggcatcaataatacttgacattggtgttcaaattaatgtttggcgaattattgttgcttcagggaaaagaggtcaagaaattgctaatttggtccttcctgggcttggatatgttgttacaactttaattgtaattggaggtttagctttcaatattggtaatgttgcaggagcagctcttggattaaatgttttatttggaataccattcaaagctggagccataatcactgcatttattgcactatctattttcttatttaagcaagttggagaaataatggatagatttgtgagagcttttggtatcgtcagaatattattagctatatttgtcatgatagctgctactccgccagtaggacaagctgctgtgaaaagtatttttcccgattcaattgatatgatgtctataatcacacttgtaggaggaactgtaggaggttatataacttttgcgggtgctcatagacttatagatgcaggaataaaaggaaaaaacttagttccagaagcaacaaaaagctctgtaactggaattttaattactggagttatgcgtgtagttctttttttggctgctcttggtgttattacaaaaggatatgcaatagaccctacaaatcctgctgcttctgtttttcaaagtgccgctggaaatataggctataaaatttttggaatagtattatggtcagctggaactacatcagttataggttgtgcttatacttcagtatcatttatgaaatctttcagtgaaaaaatagataaattctatagcaaaattataattgcatttattgttttttctactattgtttttgtaatagtaggacaaccagcaaaagttcttgttattgttgggacaataaatggattcgtacttcctataacacttacttctattttaattggtgctcataataaaaaaattgttggagaatataaacaccctgtttggatgactattgctggattcatagttgtagcaattacagcatatatgagtgttcatactgctcttacgcagcttttctaattattaggttactattagagagaatgaggttccagtattttgggcctgtagcgtaactccacaagcagttgctatggaagttaaaccagagattatgatcactcattctctagggaatatgtttataactgatataaaggataaacaatttagtgttttataattttcaaaaatctttggaggctaatatactatggataaaaataaatttgaaatttctcaaataagtgaaacatcagctttagttgaatttgggaaagaaattagtgcagatataaataagaaaattcgtactttctgttcatatctcgataaacatccttttactggaatggtagaatatatacctgcctttgctagtgtttctattgtttataatcctttaaaactgaattccgactctccttatgatgatgtaaaatctattttaaatgatatattgtctaagcttgactttacttcacctgacaaggagcacattgttgaaatccctgtatgctatggaggagaatttggcccagatttagaacatgtggctaaaattaatagtcttacggtagatgaagtaattaaaattcattcagaaggaaactatttagtatatatgatcggatttgcaccaggttttccttatttaggaggaatgtctgaaaaaatttcagcaccaagacgcgagtcgccaagagcagtaataccagctggatcagttggtattgctggaatgcagactggagtatacccaatagaaactccaggcggatggcagcttattggaagaactccattaaaaatgtttaatttggacgggaatcctaaaagtcttttaaaagctggagatatagctaaattctatcctatttcttatgaagattatttaaagctaaaggaggaaaattagtgaatatatctgttttgagctcaggacttctcactactatccaagatcttggaagaattggctaccaaaaatatggagttatagtcagcggagccatggatacttatgcaatgagactttctaatattatggttggaaatgatgaaaatgaatctgtcttagaaatgacattaattggaccttccttaaagcttgaaaaaggaactttattttcattaactggtggaaatctctcccctaccattaatgaaataaaagttcctatgggaagacctatttatttaactaaagactgtatcctaaaatttggcccatgtattaaaggctgccgatcttacttagctgttgctggaggttttgatgttccaaaggttatgggaagtaaaagtacatacttaagagctggatttggtggctttaatggaagagcactaagaaaagatgatgtacttaacattggtgttaaaaactcactatcacatgaaataattaaaaaaatggaggatcttgatggtaatggcgaatttgtttcttcaggctggtatatgaagaacttcatgatgcaaaaccctgatagtacagttattagagtatttgaagacagacaatttaatgcaatctctgaagaaagcattaataaattctttaattcaaagtttaacgtagaaaatcagtctgatagaatgggttatcgtttatctggtgaaaaaattcaacttaaagaaaaattagaaatgatatctgaagaagtatctgttggaactattcaaattcctccagatggcaatccaattattcttttagctgatagacaaacagctggaggatatccaaagattgctcatgttgcatctgtagacatacaaaaaatagttcagctaaaacctaacgataaaattacatttaagaaaatcacactaaaggaagctgaaaaactatattttaaaagagaaaaagatattgtagagctaaaaaaatccatgagattaataactatatagagtttaatgagtgcgtatattatatatttttaatggtaggaacttttaaaactaaatttttagaaataaataaatatttatactagtgtacctttttatctttttaaattcttacctttttaaattgtaaaaaatctaaaaaggtaagaatttttcatcttttaaagttttacatataaatttctagcatcatttatagataaaaaatttaagaattcacattattagatgagagtatttacaaagttgctaaaactttagattcatatcctcactagaaataataaatatatttgtaaccacaaggggcataatataaagacatttgaaaatgagctattaaatattttggtgagatatacacataagtatagattatagctgaataatttcacttatactctgcaataaataccattctagaaagcagaaacatttttatgcagcaggcattgaaaatgagatgttaaaagctcttaattgtaggttgttccattaatgcttgtcacaatgaaattgggagcaagcattaatggtgcaacctgcaatttagcactttcagcgaaattttcacagtcctgtgaaataacaatgtttctcctttcggtggattattgcataagtctattttatatattgtttatatataaattattgttgctttaattaaatcaatccattcttttgtagaaattctactgcaacatctttaggatctttttttaattcatctacttcatagtttaattcgcccattacatcattattaagtaaatctcctacttcttctacaagcggttgaatttcaggatatttctttaatgtctcagctcgtacaactggaaccgcataatatggagggaagaagtttttatcatcttttaaaacacttaaatcatatttttttaataatccatctgttgaaaatgcatctataacatcactttctttattcattaatgccgcatacctaggactaccatctatgcctacagtattcttaaaattcaaattatattttttagctaaacctactaatccatcttccctattcaggaactctaaggttgtagttgcagtaatgtcacttgaaactttagataggtcacttattgttttaagattatattttttagcagtttctttcgttacagcaagtgtataggtattattaaatcccatctgttttaatacttctatattatacttatctttaaaatctttttttactgtattataaacttcttctacatctgatataggtttatactttaattcatctccataggctgtacccgtataatctacagacatatcaacatctccattttgcatagctgaaaatataacctgagtaccacctaatgcaaatttacgattaactgaaatatctgtttttctttcaataagctctgataatatatttcctaaaatctcttgttcagtaaagtccttgctaccaattgtaataacttttttattagaaatctttttagataatccacttactgcaaaaatcccaataagtacacatgcagtggctgctaatatacccttttgtatttttctagatcttatttttgcttctttggatttattattagctttttgcaaactgattggtgtaacaagtttttccacaatactaaataatccatctactaataatgctaatacacatgcaggtattgctcctgctaaaatttgataattgttaacagttcttataccagaaaagactaaatatcctagaccaccgccaccaataaaggctgccatagtcataagtcctactgctgtaactgctgaaattcttattcctgacattattactggtagtgctaatggaatttgaaccttaactaaaacttgaaatttagtaagtcctattccctttgaagcctctagcatgtctgaatttatactatcaatccctgttgttgtattttttataattggcaataatgagtatagtactaccattacaatcgctggcggtgtaccaatccctaagaacggtattgcaaatcctagaagtgccatgcttggaattgcttgtacaacactagctattcctaagattggcttgtttagctttttcacatagcttgtaagaattcctagcggcataccaattattattgctatcccaacggataatgctgtaagcttaatgtgttcaagcagcaatgtaattatctgatcttttgatgtaaatatataatttaaaaattcgttcatactaattcacctcttccatatctaaaaactgactgcttagagttgttaccaagctactttttgtaattataccttttaaaactccaaagtcatcaagaacaggtacttgccctattttatgttcctttacaagttcaagaatgtctataatagaatcatcaggctgtacgcttataaatttattattcattatctcttcaacaggaatatttctatcagttttattttgaatctgctttgctgtaataattcctaaaagataactttctctatctataaccattaaactatcaacttttgaacttctcattttttcaatacatcttaaaagtgatgcatttttaaaacaaacaacaggatggtcaatcattatgtccttagctcttataaattctggtgaagaccatattctattctttcctataaattcacttacaaaatcgtttatagggtttttaagtatattttcaggagtatcatattgcacaatctcacctttattcattatacaaatcttatctgctatttttattgcttcatccatatcatgagttacaaacacaatagttctttttaatttactttgtaaatcaattaactcctcttgaagctgaactctagtaattggatctaatgcactaaaaggctcgtccattaaaattatttctggattagtagcaaaggctcttgcaacacctactctctgctgctgcccaccactaagttctgttggatatctatctaaaaagtcattactatttaatccaaccatatccataagttcaagagttcttttttctatacttgttttgtttaacttttcaactttaggaatcatctcaatattttctctaattgtaagatgcggaaacaatcctgtctgctgtattacatatccaatatttcgtctaagttttattacatcttttgaagcaatatcttctccattaataaaaatcttacctgacgttggcttaattagcctatttatcatttttaaggttgtggtctttccacatccacttgatcctataatagcaacaagctctcctctatttatctttagtgtaatatccttgagtattgttttgtttttaaaatctttgcgaacatttttaaattctatcaaaaattccactccccttccgttaacaactttctatctatatacaagttgttactttttatagttttagtaacaacttaattgtaatataaggttgttacttttgtcaaatttgaacttttttgctttttgtgttatagagtttcatattgaaaatctgagatactacaaagagcgaaattagataaatattcataaactattgaatcataacattcaataagcattggaagtgagctgttatatatttaattttcatttggattaagatttttcacgctaaaattataacgggtaatatactaaccatttttataatctaaatggttagtatattacccgttacaaattaattcagagatatattatggatataagaatttatttactctctcatagcagctttcatcaccgacaaaataaaaaatatcattatcacgtaacacagcatatggtcctggtgacatttctagacatccatttcttttaatacatacaattgttgcagaggtattatgccaaaaattaatttcagcaacatttttatctatgtagggggtctccttagttatacgtatctcaaatggtatgaatggatttatagacttaaatctatcagtcctatctaacaaatcaattatttgttccctcaataaatcattttcttttttttgctcttctaatttatttaatatatcatttcttaaatcattaaccgttttaacatcattatactgcttgataaattttatggcattttcagttgattttattattacaccactgcccttattagcatctacaatatccacatcagcaagtattgctatagctcttctagctgtttctgctgaaactccatattgacttgcaagtacagaacgcgcatatattttttcaccaacttgataatgtccacttgctatttttgaagcaatatctgtggcaatctgctgataaacaggactaactattcttatttttttttccatcttttcttctatcctcttattaaaataaaatttaaatacctttgaaaatattacggaatacttccaaaggtattttatcatatatttttattttctgctatttttcttaacttattataatctaacttcatataatttataaaatccagagaatcaaaaccttataaattttaaagcctaaataaataacaaaaaagttttattactacactactaatttttacttaaaagttctaaattcatacccttgcccctttaaatactctattattcctggtaaggctttagctgtttcttctttaccatatgtgtcatgcattaatagtactacttttgttttgttttcaacagtcttcttaacctcttctattaattgatctgcatttttatgagggccttctgcatcttttgataatgcattccaatctacataatgataatctttttccttcattattttatccacttccccagtatttttccaagacatatgcccccctggaaatctaatagcccttgtagaaaaatcctctcctaaaactttctttaatgactcattagttttattaatctccgacatgaagttatttgtgttgacacttccattcggatataagtacttgtaattatgtgaatatgaatgatttcctatagcatgtccttcttcaagttcctgctttagcaaatttttattagcttcactttggtctattgcttttccaagaacaaaaaaagttgcttttacattttcatccttaagagtctttaatattgatggagtgttagtttcagatggtccgtcatcaaaagataagtaaacgacttttttaccatcagtatcttcaattttctgccctttcgcttgttgcgttaaaaatttctctacagatgcaacatcatcaacataagaatcattttgcacttcagcatttgtgtcatcttctttggttttattagcttcatcatcttgatttgacccaacagcctcattagatgcaagtgcttgtacatttttatcctttgaaaaaaatttatcatctattatagatgcagctaaaccgcctaatgccacaattataatagttaaaattaatattctctttcttcgtatgcgagcatttctgttatatctgctatatctgtaattgtttctcatttccttatcccctcgtatttcttattatgtatattacaaaaataatccttcataaataattctaaaatattacaagaattttagctgcaattgtgaattgtaaaatatgtattgtgaattacagcatatataatacctttccataattatcatttaactactaaaaattatacctcattatattagaaaattgtatcatataacaataatcgccaaaatattttttcatttcgtgcaaaaaccaacacctcaataataacccatatcaatattttaatttaaaatacttaattatttgtaacaaaaatattacaatttattaactttgttattttccgtaatatattgcgagaattttaacagtaattgtgaaatatgtattgtaaatttcagcatatagatatttaaaacaaaacttagacttgtacaataacttaccgaaaggaaaggtaatctgttgtttcggttactgagaatatgctgaagctttctaacatcataagttgcaccatttcagcatgttcctgagcaagctcgtgacaagcaaaaccagaacaaattcatatctaatttctagtataattcccaaaggctaaagtatatggatatctatacattacttaaataagaaaaaaagctgaaacagcctattattttttaggttattccaactattttttaaattaatcctatgttattttgttacatttccatatagataacacaatcataaactatacttagactatgaaatatcttccaaccagaaatgagtaatatacttttgtggaatgtttcattggtaattttgatggatgtgattctttggctataagttgttccaaatgtgctagttcaaagcttgttctttgaggctagcactttgggtgcaactttatagccttagaatcacccatcagaattacctagaaactggaacaaaagtatgttattcatttcggtaagttatgacataaaattagttactgctaagtacccaaggtttttcaatactattttttagaatattataagtattgataagattcattagtgaattatctaaatccttactctttagaagttcagctttgtagtcattttcagttattattcctaaatctacttttgcttttagagacctaagctttgtattattagatataatctgttcatttagtctctttatttgattttctaagtcacataatgttgaataattctcttttaatacatttttaagacttttctttgaatcatctaatttaaccttggcttctgccaaactgtatctgccttctaaataggactgataattattaaatgcatttaagtattgctgcacatagctaacaatggctaaacaatattcctgagtattgaaagttttgttgccatcaccatcaatctcgtaataatcattcttattaaccttcaccacttcattttcataataactaagcttattcatatcctcttctcgtagctcatgcatataatcatcagtaagtttaataatttcatcattatactttaaatatctatctattttatcatttaaatattcatctattgatccatcaatttttaaattttcataactaatacttgaatccaatgtataatctgataaattgagatttgttaatattcctaaataatctaaattattttttaatgagttttctttagcctttatctcatcttgtgccttattcaattcaatttgcttgtcctctaactgattaggaattgcaagccctactgaaactttcatttttaaagcatctaaatcattatttttgatttctaaacctgtttttaatttgtctatatcaatcttttttaagatgattgaattatatctctttgtaacatcatttgttatttgatcctgtaaaaaagcttcagactgagcagtttgtttcttttgaagtttaagcttatcagatggaaaatcatctactttatcattgccagtctttaaattattatcatcagagaaatcatctttttcatcctgaagatccaacttatcatcatacagcttcaattctttttctttcaaagctaacttatcactattatcaacagcagattttataagctcatctaaagttataactttctttgctttactagtttgtccgcctaaagtatttgtattttcacctgatgtacttgaatttaatacaatagaattacttttatctgtcaccactttcgcattttcagctgcaaaagcaggaataatccctccattaatcatgctaactgtaataccagctgcaattactttatttatcttcctattcattattattcacccactcaattaataatttgatttgttcctcttttatatttcttgtactcaattttttaatgtccatagcttgcccataatcactcattaatgagttaaatatttaaaattagaaatatccaaaccagataaatttgatacacataagtttacttctcattgaataacactatagataaacaacttaagaatttgacttactagatgaacatatatacaaagtcgctaaaactttaagttcatatcttcactagaaatcataaatatatttgtggagaaaacatttgaaaatgagctgttaaaggttcttagctgtaggttgttccattttagcttgtcaaacttaaagttggagcatgctagagtggatacaacctgctgcttagaatcttcagcgatattttcatagcttttcggaatcaaaatatttatgatttcggtgaggtatacgcataagttcaggtcttagtttgtttgtctatatatttaatacaaattattcattctcgccttcattaataatttcctcctcctgtatttctacttctttattctctagaacaattttattttcagactttttgtctactttgtaccaagaagcataaataactggaagtacaaacaaggttaagatagttgcgacaaatagtcctccactcattgccactgccatagggccccagaaagtatttttaattaatggtaacatccctaaaattgcagctacagcagttaagataattggcctaaatcttaagatagttgaatctataatagcttcacggatagattctccagtcttaatatgatttgcaatttgatcaactaagatgacagaatttcttatgattatacccattagtgctaaaatacctaacactacgacaaaccccattggactgttaagcataagtaaagctaatgttaccccaattattccaagtggtgctgtaagtaaagtcattatcatctttggtacgttttgtagttgaagcattaagagaattaccattaaaactatcataataggaacaacatctctaacctgagccaatcctttattacttctttcaagagctccacccatatctatgctatatcctgaagggagagtctttcgtaaatcttcaagctgattgtatatatttgtctctgcatcatttcctgttattcctggtaatacttctgcttgaactgttatagtcggttttaaatctcttcttactatatagccatcttcagcatcataatttattttagcaatttgatccattggtataaacccgccgcttggtattggaatatttatattctttatataaccaagatcattaatgttaactgaatccattttaactactatatctactgtcttatcatcttgtctaaattgagatactgtagtgcctgacaattgtccttgcaagaataatgaaatttgttgactgtctaggccaagtgccctagctttatcctggtccacttcaatagacattgcttttgttttttcaaaccagtcgaaattaatattgtataatttctgattagatgccatggcatctcgtacttttcctgcaatttcacgtactttgtcattatcataacctgtaacccgaaacatgacaggataattactaggaggaccattttggataacctttatatgactttgaatattttcaaacccgctatcaagcaattgctcaacattcttatttactctttcccttgctgcaatatctttcgtcaatataacaaactgtgcaacattgctattctgtgaggcaggctctaaagataaaacaaatcgtggagcacctcttccaacataataagaataattaacaatgtctttatttccttttaaagcttccgatagacgatctgcagcttcttgagttgcactaattgatgaaccctgaggtaaagtcatatctactaaaagttcaggccttgttgccgctgggaagaactctttttgaacataatgtgaaagtgcataaccagaggtacaaaacaatattaatgttgttgttattactaattttctatgatttaagcaccaatttaaaacgccacgaaatttattataaaacttgctgtcatatacatcagattttttattttcattatttttaatctttattaaatcaaaacctaatactggtacaaagcaaactgaaacaacccatgagaaaagcaatgatatagtaactacagtaaacacgcttccagtatattcagatgcacttcccttagaaaatcctattggtgtaaaagcagaacaagtgatcaatgtacctgtaagcataggaaaagctgttgatgtaaaggcgaaacaacctgctctaaacctatcccatccttcctcaagtttaactgacatcatttcaattgctataattgcatcatcaactagtagtcccagtgcaattatcaaagctccaagtgatactttgtgaagcggaatccccaaaaagtacattccaacaaatactcctgcaataaccagtggaattgatattgcaactactaatcctgtcctaaaacctaaacttacaaaacttactaccattacgataacaagagctaaaacaaaagtttctaagaaatcattaatagaatctgtaacagcctcaggctgattagccacctgatctatatttaagccaagaggtaaatcgtttttaatctcatctagtgttttgtctaaatttttgcctaagtttaaaacatttcctcccttttccatggaaactgcaattcctattgattcctttccattaaaaaacattttaggatctggaggatcagaataccctcgtgtaatagttgctatatctcctaaacgaaaggtttgattacctgctttaattggtaagtttgagatattatcaacattatcaaacattccacttactctaagataaacattatctgttgatgtctgaatcattccagatggtataacagagttctgtgtctgtagagcactgctgattgtattaggactaataccaagttgcgccattttagtattttctatctgaatagatattttttctgtttgaacacctattaagtcaacttttttaacatcttttacatttaataaggtcctacgaatattttctgccttttctctcatttcttcataagtatagccatcagatgttaatgcataaacacaaccatacacatcatcatatctatcattgaaattagggccaactatattagatggcaaattgcctttcatatcattaatatcattacgaacttcaacccaagtgtctctaattttatctgaagccacgtcatcttttaaatcaatgaaaataactgatcttccaggaaaggaataactttttatataatccttattaggtatatcttgaagtcttctctctattttatctgtaacctgctcctcaacctgacttgcagttgaacctggccaaacgacatttatgtacatctcacgaatagtaaattcaggatcttcatttcttccaagtttgggataaacaaaaatcccagacacaattattgtaatagctaaaaaataaaccagttgttttctattaagacaccactctgtcagattgaaacccttcattaattatcactccctactcttacttcctgaccttcgcgtagtttggtaatgccggctgtcaccactacatctccttcgcttaagccatcacttactgtaacctgatcactaccgaagtcctttactgtaatattttttagggtaactgcattatctttaacaacccaaacagaaggagatgaatctggctgatatacggctccaagtggtatccatatttgactcgatgagttattttcgttaatagacacactagaagacattcctatttttatgctaggaggtggatctataagatttattctaactctgtaagtacgtgatgcatcattagctactggagaaatttcccctaaagagcctttcaatttaacatctgataaagctgaaaagcttatattgattcctttagcactttttaattgatcaattctattttcaggaacattaatttctacttctaattgattattctgaactagtgttataatcttctgcccaggtgtgacaacttgtccttcttcagcatcaataccactgattactccagatttatcagcacataatttacaataatccagttgattcaaactttgagtatgcaatgcattggcctgctctaatgcatccttcgctgtttcatcagcattcacgtaattatcatattctgcctgagatataaatttagattgataaagtggctcatatcgtttcaaattatcttcagccagtttatatttggcttctgctagtgaaactgccgcttcagaattttttactgcttgttcaatatctctagaatcaagttccatgagaactgcaccttgttctaccttatctccaactgacacattttttttaataatctttcctcctacttggaatgccagttgacttttatagtgaggttggactactcctgaatagatatattctgaatctttattggatgttgagatcgttagagtttttaccacaggaggtggcaaaactgtttcctctttctttgaatttgttttcactactttaaaaacaaaaaaacaaatagccactattacgataacgagtaaaaacttttttatcatcttaattttcattgtaaagcaccccttttaaattttcttgattacatcttcaatctttcaattgaattacatctttaatcacacaacacggtgttgtataattaaattataactgatatgaaactttcatcaatcaacaaaacaaaaccaagtgttggaaagaaggagataatatgaataaacaacctgaaattaccgaacagacaaaaagaaatattatagatgcattttggaagattttaaaaaagaaaagattagataaaataacagtaaaagaaatagccgatgtagccggctataatcgaagtacattctatgcttatttcacaagtgtaagtgatatacttgagcaagaagaaaatattttacttcattatatacatgataatgcaagcaaaatattgtttcctcacttaattaaaggtttaagacctaaagcttcggatctatatttctttactaaaagtgaacatttgaaaattttgctcagtgaaaatggtgatcctaaatttaaaggaaaactaaaaaagacaattgttccaattgcctttaatgcatttaacttacctaaggataatattcacgctgaatatctttgtgaattttgtttttctgcagtaatatcaaccataatccattggtatgaaaatcaggaaatcgaaatagatgaattattcgatatactttggacaatggttacaaagggtgtactatttgaatataaaaaattaatatgaaacatacatacttagctaaaacattatacttaataaactgtacataatttcttctacttctaaagaaactatgcacagttttcactttaaatttatcattcctattctttaacatagagtattaaaattatagccaaaattaaaactcttcaataatattaaagcatttttttatatcacgctctccttttgcaatcacatcacttagcagccaagtattttcctctgctttttgaaacttccaatattgtgcaaacgtcttaactttattacttccaaatagaatctctccatctgtttcgtctacaacataatcctttgcattatatttaatgacaaaccatacaacatccttataactatcatgatgatgaataattccaactggctctgcttctataagttcaagttcttctattatccttccaatattctcaaaagagtatcttttacattgtgattgcagctcatcataacactcggtactcatatatttttgacacatttcaaagctcatgcgttctagtgattcaattaccttagaaaatgtttcttttacagtgcttctaagaaaagcataagaaatatgaatatatataaatttatgaattccaaaatactatcttcattaagaaacttcttattaaaataaaattcatttttttattaacttctaaaaatgttcgttcagctgttttttatcctcaaaatataataaattcatgcatttttgttatttgggacagctcaatataaatactaatcgaagctcgtccaatattttttcttccaaatgtatatttgtgtaagcacattatcgtatgctcgattacactattgtcatataataattataatattaattccaatattatgtatatagataaacaaatataggtatattcatttaaaatctattatttcttatattctcaagacgttacatttcataaatcaatgcggttcttgtttaatataaattgttatattgttaaatttctttatttgtaactttttaactttttaattttttttattgttaaaaagttttattggaaaatatatttatttaaaacatgttgtatattaacaataaagagccaagcaaaaacaatcattaaaattgctttttgcttgactcttaaataatttaacgtgagttcgatggaaaaatttaagggataaaaaatcccatcaaaatgttttattatataagtgcgaccaaataaataaaacaaaggatgggattttatgcaaaacttattagtggaaatattttatgatgtagacaatttttgtattggatttgaaaattactgtaaaagtcatttcctaacggaaaatagcgaccgcaaatttgcaatgattaaaagtaaaactttatcattaagcgaagttatgacaataactatctactttcatttgtcaaattacagaacttttaaatcatactatattgagcatgtgtctactgttctcaaaccgtattttcctaagcttgtgagctacaataggtttgttgaattaatgcaacaatcattagttgcactactattatacatgatgaaatttagaactggcaagtgcacaggaatttcttttatcgattctacaactttgaatgtatgccataatagaagaatacactctcataaggtttttaaaggaattgcagaacgtggtaaaagttcaacgggctggttttatggttttaagcttcatcttgttgttaacgataaaggggatattctctctttttatctaactccgggaaatgtagatgatagagaaattaagactatagaaatattagcaaaagatttatttggaaaactttttggtgacaaaggttatttatctaaaaagatctccgatattttgtattccaaaggtattcagcttataacaaagataaagaaaaacatgaaaaataaattaatgttaatggaggataaaattcttcttaggaaaagagctatcattgaaacaataaatgaccaactaaaaaatatatgtcagatagagcataatcgacatagaagttttactaattttgcggttaatatagtttcaggattgatttcgtatagttttcttcctaagaaaccttctcttaagttggacaaatatctaactatggaataattggaatatcgaaccacaagattacaaggatacttttttgctttttttcataaccatatttacccataaaatattctagcttttcgaactcacgttaatttagttcattttaatccaattcttattcaaatacagccgctacatcgtttaagcattttgtaatttctatatgttgtggacaatgtccttcacattgcttgcatcctatgcaatcagaagcctttccatgctcttgagttaaattattatagtagacctgtgaaatcccagggccaaattgtttatagttattaaatagagagaaatattttggtatttgaatattctttggacatccatctacgcaatactgacatgcagtacatggaactgcaatactactattaataatatctgtagcttttttaataatttctctttcttcgtcatttaaaggcacaaaatcttgcatataacctgtgttatcaagaagctgttccatatttgacattccacttaataccatcattattccttcatgacttgctacaaatcttattgcccatgatggcacagacatatctttgtggtattctttaaacaatttttctgcttcttctggtacatttgctagagtcccacctttaattggttccataacaacaacttgcttattatgttttcttgcaacttcatagcattttctagattgaatactttcattgtcccaatcaatataattaatttgtaattgaacaaaatctacttctggatgagcagttaagatttcatctaataaatctgcattatcatggaaagaaaagcccatattttttacttttccttcttctttctttttttgaacaaatgcaaaactatcaaacttttgagcatttttataatttgatatacctaagttgtgaaggagataataatcaaaataatccacaccgcatttttctaactgctcgtcaaaaattctttcttgatctccctcttttttcaaaaacatagttggcagttttgatgctactgtaaaactgtctctcttatgacgttttactaaagattctcttaaagcaatttcactcttaaatgcatgatacatatacgctgtatcaaaataagtaaaacccctttccaaaaaagtatctaccattttatttaacatttcaaaatcgatactttcttgattttcttgatcttttagcggaagacgcataaatccaaatcctaattttttcttctccatctcttcgtttctccttaactcttttaaaatagtaaattaaattgtaattttcatgccctcattcataaattgaattaaatatttaagtaattcttattacaaactaaattctactactttgagtaaactctaagtcaagtatttttttcactctaccccctaaaatgaaaaagtaatttctggattgcaatactaaattcatcttacgcaaagttaacgcctcattttcatgggcttccaagaatcaaaacctacttatttacttaactttatatttagaggtgtattcctccacgcttatagatacccaatttaagaatttgacttattagataaatatgcttatagagttttcaaaactttaagttcatatcttcactagaaatcataaatatatttgtggagaaaacatttgaaaatgagctgctaatattcttagttgttggttgttccactttagcttgtcatactgaaagtaggagtatgctaaagtggtgaaacctgcaacttagaattttcagtgatattttcatagcttttcggaacaaaatatttatgatttcggtaagtaccacataaatctagctttaaatttggatatctattcaccccaactatttttgcatatcttatatatttcatatatttcttcatcagtatatttttcaaaaacatgctgattccaatcccatctactattttgcactctataatttccacaacaacttattttaggatgctccattacatttaaatttgggtccgttcctttaactaaagaaattaaatcttttttatctaaatcaagcttcaaatccatatctcctttgatttcattacttaattatattcctaataaattattatattcacttatcttttagtatcattttttatactatgttacagaaaagtgcgctcttatataaactgcttaattatgttataaatatattatagaaatatcaatttaactttctccgcaaggaataaactaaaatatatgaattaggggggacctttaaaatgacaagacaatctttattgataaaacgttatgataagttaagctcaaaggtaattgatgctttgaaaaagcgtcattttgatgcttattattgcaagactaaagatgaagcagttaagcaaattttggatttgattccagaaaatcatgttgtatcttggggtggctctgaaaccttaactgaaattggcataaaagaactcgtaaaagaaagaggctatcaagttatagatagagatactggaaaaagtccagaagaacggacagaacttatgagaaaagcacttttatgtgatacatttttaatgagcagtaatgctataagcgaggatggtcagctatttaatatcgatggaaatggtaatcgtgttgctgcaatgatttttgggcctaaaagtgtcatagttgtggctggaatgaataaagttgtgaaaactcttgatgatgcaattcaaagagctagaacaattgccgcaccatcaaatatgcagcattttcaagatatgaagactccatgctatataaatggcagctgtggagactgtctaagcccagattgtatttgttcacaaatggtaacaacaagaactagcaggccatcaaaaaagataaaggtcatactaattggcgaagactttggcttttaagcagagaacctgaatctgtgattcgacgtgaatcgcttactcattgaacgtatgtgagtcgagtttccttttaaaatttcacaagacaaccttaattggatacatattagttccataggactacgaaaatttcgctgaaaggttctaaaatgaaaggttgcctccattactgcatactcacgctttcagcgtgacaagcagcaaatggagtaaccttccataaagaacctatacagcttattttcaaatgcttattgctaaatatgtatccaatttctctgtttatatgaatttaaaaataacaaatttttaaatgtataaatacacttcgaaagatgccactgaaaaagtccacatatttttgcttaacttttttaagcaaataagtccaacattataaggctatctaataaccttataatcaccttttagatatatttagctattgattttaagccatattagttttatctaacccattatcaacaaaaatagcatacattgtaccatctgctttcatctcattaattttttcattaaatgcattcaatagtgttatgtcattttttctcatagctatgccaacattattagttaactctggagtataatctcttagtaatcttaaagggagcttggaatttttaaatagagaatattttccgacaacagaatctaatatgcctgcatcaacttttatactacttacagcattaaataattcaggcagagtatcaaacgttgctatatcttttattaagttctcattcttccatctttctgctaacttttcatatactgtaccttttacaactccaaccactgaagtttttaaatcactcttaaaattaatagttgataatgctggaaccacaatagattctgaaattttatataatggctgagtaaatgctacaagcttttcacgttctggcgttataaatattccgcctgatgctatatctatattatcatcagtagttaatttttctaagaaatttagaaatgttgcttcgttgatttcaatttttgcattcatcccaagccgttttataatttcatttagtatatctgcttctataccagatacctcatttgtatttgtatctctataaaaatatgtacgactgcttgttattgccgcgacatttattactcctttttcttttattctctgcaacctatccttttcaattgagacatttgctaatgcagttttactattatcttttagagcagtacattcaaacattattccaataaaatttactataacaataaatatcaataatttcttaagtatcttatccatataagcctcccttgtaaaataaagtagtactttttaaatccaatgatattttgcttaatataataaattttaaacatttttttctatagataacaaactttaaaactaaatttatgtggtaacttaccgaaatcataaatattttgttccgaaaagctatgaaaatatcgctgaaggttctaagcggcaggttgtatccaatttagcatgctccaactttcagtttgacaagctaaattggaacaacctacagctaagacctttaacagctcattttcaaatgttttctacacaaatatatttatgatttctagtgaagatatgaacttaaagttttagcaactttgtaaatacattcatttaataaatcgaattcttaaattgtttatctatatagataatcaacctaagacctgaacttatgcatataactcgccgaaatgaataacatacttttgttccagtttctagttgggatatatttcatagtataaatctaacttataattggcttatctatatagatcaaccaattataagctaaattcatactagttatatacaatctgcaaaatatttatccttagaacactaatgtagaatataataaagaaattattctaataagcaatcttctcattttgagtattataacggtgcaatccctcctacaatttttaaggctatatctataatttaaaatgtatcatacaccagaaagaaagattactcttttgtacagtattgcatcagagaataggctttaggtatttctttatcagaagttgttccaatgttgcttgtcatgagctttgctcaggaacatgcagcattgggtgcaacttttgatattagaaatccaaagccatattctccagcaatcgaaataacagagtaatctttctttcggcgagttaccacataaatctggttttaaattttggtacctatataaatgcagaacaaagtggctgcgccacgctctttcttgataccactttttacaagccaatatccttataaccattggtatcactgactttcaaaattaaaaaattctatactttcctagacaataaaaaataacaagttccctacaattgtagaaaacttgttatctttatatagtttatttaaataggtttaattcacaatctgaaaataataaatcagtatgcaggttgatttattattttctcatgtgcctaatgtgagggcattttaattagttttttatgatattatctaagcatccatcctgaaagtaccatcatttgaacttctgatgttccttcatagatttctgttatcttagcatcacgcatcattctttcaattggataatcacttgtgtatccataaccaccaaataattgtaaacaacgatttgttacatcagtagcatttctagcagcaaataattttgccatagctgctaaatgtgtgaatttttggtgatcgtcttttgcacatgcagcttgatatactaaaagttttgcagcttctgtatttgcacgcatttgagcaagttcaaattgtgtattttggaattgagcaatagcttttccaaattgaacacgttctttaacatattttacagtctcttctattgcgccttctgcaataccaagagcttgagcagcgataccaatacggcctccatcaagagttgccattgcaataccaaatccttttccttcttctcctaaaagattttcctttggaactatacaattatcaaagaataattcacatgtagaagatgcacggattcccatctttaattcatggcttccaacagaaaatcctgggaagtctttttcaactataaatgctgaaataccttttgttcccttactcttatctgtcatagcaaaaacaatatatatttctgcatatcctgcattagtaataaagattttgcttccatttaatacataatgatctccctctaatactgctgttgtcttttgcattgaagcatcagttccagctacaggttcagttaatccaaaggcacctagtttttcacctgaagcaagtggttttaaatatttttctttttgagcatctgtaccatatgtgtaaattggtgttgcacaaaggcttgtatgtgctgaaactataacacctgttgttccacaacatttagataattcttctacacattgtatataacttaatgtgtccattccagctccgccgtattcttcaggaaatggaattccaagcaagcccatttcagccatttttgctacattttcttctgggaaacgcatgctttcatcgatttcttttgcaattggtttaacctcattttctgcaaagtcacgatacatttcttgtaattgttggtgattttcatcttgtttaaaatccatttttatttcctacctttctttttttcatcttttccttttttatttcatgggatattaatatatatataaatttttaattatgagcttaattttctattggacagcataccttacctggattcatgatagaatttggatcaaatacttctttaatacctttcattaattccatatttatttctccaacgctatcagctaaataactcatctttccactaccaattccatgttcacctgaaacaagtccaccgcatttgattgcttcttcgtaaatgatcttaaagaatttatcaactcttgttttgaactcttcttcttctaaatcattactgcattgatatatgtgaagatttccatctcctgcatgcccaaaactcttaatagttaatccacactcttcaccagttttatttacaaaagcaagataaggagcaattttatttactggaactacaacatcacattcatctaacaattttgtttctgccataatagcttctaagaaacttgaacgtgcagcccatgcatcttttatttttgcaggtgtatcagctacaagaacatcaattgctcctgcttctaatactatttcacttgcttgctcaataagattatttaattcatcttcattacctgcatctatagtaacaagtaaataagcatttgcagtaactccatcaataacttgtgggaatacactctttccaatatatctttcgctagataaaacaatttctctttccatgaattctatcgcttgtggattcatgtgttccattctaaattttggaacagtagaaatacaatcatctaaattttcaaaaggaataattaaacttgctactacctttggtgctggcattactttcaatgtaagttctgtaataattccaagtgtaccttctgaaccaatcattagatttaaaaggctataacctgagcttgtttttgatactgtagcaccaaatttagtgatttctcctgttggaagaacaactgtcattgcacgcacataatcacgtgttgcaccgtatttaacggctctcattccaccagcatttgttgcaacatttccaccgaggcatgcgaacttttcacctggatctggagcatataataatccttgttttaaacaatcctctgcaagatcatttaatagaactccagcttctacatgaacaacaaaattttctaaatcataagaaattattttgttcatttttgtaatgtcaatcaaaactcctccaagtagtggaactgctccacctgtaagtcctgttcctgctcctcttggagttactggtattttattttcattacatatttttaccactgcagcaacttcttctgtagaatgtgccataaacacaacttgtggggctacttttccgtaaataggcatttcatcgtgactatagtcatcgtttatatcagctcctgttaaaatatgccctggtgctgcctcctgtaattttgagattatctcctctgtcaattgattatactcagccataatattcattcctttctaagatattagatgtaaaattcactttatctttctttagcaaattactacgccgaactaattcagtttacattttatgtcctttaggatatcccatagacaatgtagacttcttaataaggtttattaattttctaaaaattgctgaattttcctggtaaactttaaatggtcacctgtaatacatatcaactgccttaaagtgttccaacaaaacatactattccagctataactacataacaaacaaaatatttaaatacgctttttaaaattttactttccgaacctgattgattaattgcacttgcaccaattgcaatactttgaggacaaatcatctttcctatacctgctccaagagtatttgctgctgccatccatgcaccagaaagaccaagattttgcgcagtttgaacttgtaatcctccaaataaaacactggttgatgtacctgatccagttacaaatcctccaatggctccaattaatggagaaattaatgggtatgctcctccagttactacaactaaaagacttgcaatatctgaaatcattccactataccccattacctttgccgttgacataactgcacaaattgtaacgattgttttccagtttgcttttaatgtgctacgcagtacatcaagtattgttgatatttttgcgccttgaacgagaccgccaatgactgctgcaacaagaatgataatacccggtgtattaatccagctaaatgttagggtatttccacctttaccagcatatacgcttgtactggttttaaatactgcaattgcatcatgaactggtgcacataatgttgatgtagccattaacattacaaagattaaaataaatgggcaccatgcttgtactgctttaccaaatgataaagctgtttcttcttttttcttgttaatttgaatgcaatactcatcttgaggctttttattaaagatttttgctgctacaactgtacataccatacaacagatagatcctactatatctggaagttctgctccaactgctgttgctgtaatataagcaggtactgtaaatgataatgcagctactaatgtaacaagaaatgctcccttcaatgcctttattcctccacctacgatgcataccataataaatggacttataaagcaaagaattccttcaattattactgtatttactgccaatgtgtttgatccaactccggttactgccgaaagtgttacgagtggtattcctactgaaccaaatgctgttggtgtactgttagcaactaaacatgctagaactgctgaaaatggatttaatccaacaccagcaagcatagatgctggaatagcaactgctgttccaaacccagccattccttccatgaagttaccaaatccccatccaataattaatgttaaaacccttttatccatagaaactccggccaacatttcctttatgaaatccattgcacccgtacgtaaaattaaattatacgtaaacaaagctgcaacaataactaaacagattggccacaatgcgttgagcactccttcaagtactcctgtcacagtataaaccacatttaatttccagaaaaaaatagctaaaaacattgtaagaacaagtgcaatagagcaagctttataacccggcatttttaatccactgagtgcaactataagccaaatgataggtaatatcgccattaagaatttaaaaaacaacattcctttatcctcctcatacgatttttaaatggtataaccttttaaaaatcgttattacttttttggtcttaattacatagcttcccacttgttgattcaatactatttttacatatattcggatttagttgttttttatatgctgcgtctcttattcaattatgttttttaataattctccacgtatacaagtgtgaaatttatacataatttcattttcttgtgaattgagatttattttttaggctgtcgcgctaattttttagtgcgacaaccttttatcttatctggaaaaagtatttattctgcttttgcttttttcatttcttcaatcataattggaaggatttcatttacatttccaacaattgctacgttagcaacttcaaaaattggagcttcttcatctttattaattgctacaatataattagagcctgtcattcctgatgtatgttgtgttgctccagaaataccgcacgcaatataaagttttggtgctacgatttttcctgattgtccaacttggtgtgcacgagaaatccaaccgtcttcaattgctggtcttgttgcgcctactacgcctccaagtacacgtgctaattcttcaactagtttgaagttttctgcacttcccattccacgtccaccagaaacaataacttcagcttcttctaaattaacagattcagaaatttcttttaccgtatcaataatttttgccttaacagcatcagctggaatttctattttcttttctgtaacgtctgcctttgaagttgcttctggcttaggaaagcttccatttctaactgttactacagctgttccctctacttcaatatgttctaagattgtaccgccataagctggtctagtatatataactttattatcagccttactcattcctattacatcacttacacatcccaaattcatacgacctgcaatacgtggtgcaacatctttagcaagtgttgtattagctaataaaacaatatctggattttgttccttaacagtttctgataatacttctgtcatagtatcacaatctgtagctgtatcagtaaaaataactggaattccaaatgctgctattatatctgcaatagctttatttcctaccacaagagcagttccttctgcatctaatgcttttgctgcactaataagttcaatacttccacctaatgccttttctccatctgtttcaatgaataataatgctttcatactttcgtttcctccttaattagattgccttatcttttttcatttgctccataacagcacttactgctaaagtagcatccttctcttgaatcttgataccagcctctttcttaggaggtgcaacatattctattaagcgtacttttgcttgttttacctctccaatttctgctgctgaataagttgggattactgccttacggcttgccatcttacttttgatagtaggataacgtggatcataatctggcttgcttactgttactacagctggacattctagtgaaactaaattatatccttcttcagtttcttgatgaatttccatagaattatcttttaaatcgatttcaatagcgctgctgacatagcctgtccctaacttttctgaaagcatagctccaacttgaccagtaatttcatctgtagattcttttccacaaagaatcaaatcaaatttttcacctttgtcttcttcaatcttatgaatagcatctgccaaaacattagctgttcccatagcatctaaatctgcatataagtcatcttttacaaaaaatgcttctttagctcctacagcaaggcaattttttaatgtgtttaaagaatcatctgctccaactgttaatacactaacttttcctccatgagcctcagtaaaacgaaccgctaactctaatgcatatgtatcaaatgcatttgcaactaaactgactccatttaatttaggttttttcttttcattatccaaatggatttcaatagaatcatctggaacctgttttacacataacagaatctgcatactttccctctcctttatccttttatattgctaaattgttttttgataaaaccattctgtgtcttggtggtaaaaatcaccatcaaataaatactatcgctaattcattttttgtatacgatatcgtaaattggtcttaccaattcacaagtaaattctaacacacggtaccatatatttcaatccctaatataaaaatttttttatgaatatattttaggttacgatattgcttttttacggataaaatgcaaaaaaggaacatttaaagcctttatatttctttaaatgttccttttaatattttttatggttaatccaacagtttaattatcacataaatcttgttttaaagttgagatatttagaccaatgcatactaagccttttctccatttttcttttttgctttaagtatgttgtaaataataccaagtactataaaccatacaggtgtcacaaataaagcaacacgagtttcattattaagtgccaatacaactagaataaaagcaaaaaatgctagaattatatagtttattattggataaagcggcattttgaacttactctttgcagcaagttcaggattagttttacgatacctcatgtggcaaataactatgactgcccaaatataaataaaacaaaatgtcgatatacttgttataagtacaaataccccttctggcataacaaagtttaaaataactgaaatcaaaatgacaattgctgaaaacattgtagcatttgaaggcacttgactagaagtgagctttttcattgattcaggtgcattttcttctttagcaagtgaataaaccatacggcttgtactgaagatagcactattacaagcagatgctgctgatgttaatacaacaaagtttacaatacttgctgctgctgcaattcctactgctgcaaacacttgaacaaatggacttttatctggattaattgaattccaaggatatatgctcatgataacaataagtgctcctatgtagaatataatgattctaattggaatattgttaatagcttttggaataacatgctctggtctttcagtttctccagctgtaaggccaactaattcaattccagcaaaagcaaacaccaccatttggaatgaaagaataaaaccatttattccatttgggaataaaccgccatggctccaaagatttgcaaagctagatgtaccagcatctgtagaaaatcctctaataatcataaatataccaattataattagtgctaaaatcgcaacaactttaattaaagcaaaccaaaattccatttcaccaaatagttttactgctgtaagattcataattagtaaaataacaaggacaataagacttggaagccattgaggtatattaggaagccagtattgtatgtaaagcccagcagcagtcaaatcagccattccaactgaaatccagcagaaccaatatgtccatccagtaataaatgctgctccgttccctaaataatcatatacaaagtctacaaatgaatgataatttaaattagatagtaataattccccaagagcacgcataataaagaagcatattattcctgttattatgtaagcaaataagatagatggaccagctaagtgaattgatcttcctgaaccaaggaataatcctgtaccaattgcacctcctatagcaagtaactgaacatgcctattttttagccctctcgataaattttgattttccgatgttgatttatccattttattcctccatatttattaaagcacatagataaatgcttttttattctttagaaatttatattacaataaaatctgtggacgaggtactccttgagtgtataactaaaaaaggttgattgattaattcttgtaaccattatttccccaatatattcctctaaaaatttaattttcactgttaaatactaatacatttttgacaaagttgcaatgatttcttgctttttatagcaaatttatataaatataaatattattttgtcataatactttcattatagcctttattacataaaaaaatatatattttctatcaaattaaatttatcataaaatataagataacacatctcaaatgtaagtctatttttttcggaatcaaaatatttatggtttcggtgaattatgacacaaacttagttttagatatggatatccatatatagataccacaatcataagctatacttagactatgaaatatcttacaaccagaaatgagtaatatacttttgtggaatgtttcattggtaattttgatggatgtgattctttggctataagttgttccaaatgcgctagttcaaaaagtgatgctccaaattttacatttggtaagcagaactttctctgtgagcgcttgttctttgaggctagcactttggatgcaactttatagccttagaatcacccatcataattacctagaaactggaataaaagtacattattcatttcggtgagatatgcgcataaatatagattatagctggtttatctataaaaatatatatttaaaactttaacttatgtgataaattaattagaaatcatattatttttatcaagcccattttctacaagaattgcatataaagtgccatctgccttcatctcttttattttttcatttaatgcattcaataacgttttatcattttttctaactgctatagctatatttccgcttaactcaggtgtataatctcttaatatccttaaaggtatgtttttattttttaacaaagaatatttcactataactgagtctactagccctgcatctatctttcttttatatatagcatccaataattcagttgaattttgaaaaattgctatatcctttattatcttatcatttttccacctttcacccatgctctcatacaccgtacctttttctaccccaaccactgcattttttaaatcacttttaaaatttatatttgaaaatgtcggaacaacaacggcttctgttgccttatatattggctgagtaaatgcgactatcttttcacgttccggagttataaatattccacctgatgcaatgtctatgctgtcatcagtatttaaactttctaataaatttgcaaattctgagttcttagtttcaattttattgattccaagcctatttgcaatttcggttattatatcagcctcggtgccctctatcttttttgtatttggatctatataaaaatatgaaacatcgttttgcggtgaagcgacagttatcactcctttttcttttatcaactgcaatctatccttttgttctgatacattagttactattgctctactatcatattttccagcactaccttcaaaaatcattccaaaaaaatttataattgtaattaaaattaatacttttttcgataatttcttcatgttgccctcctttagatgtcatttaaatttataaaatactattgagtcatatcctacaaggtgtataaaataaaatgaaacctctatgtttaatttactattactattttgctataaaatagcaaattttaaacatagaattcagtttttaaacaaaaataagagtttacttaacataaactcttatcacctatatttctcattaaataattgaaacttctgcttcatccttaaggaataacggtattatttctaatggagcgttatagtctattacttgtccgccattaaatatcttccctgaattaacatctttccaatttgcaccttttggtaaatatacttttcttgacctatctcctttatggagtactggtgcaacaagaacatctggtccaaacatatactcatctgtaacatcccagcaaagctcatcttctgagaaatcataaaatagcggtcttataactggagttcctttttcatgtgcttccttcatgattttagtaatataaggtttcatcttttccctgataagcatatatttcttaaatatttcatatgcttcatcaccataactccatacttcattagctgcaccgcttgcacatagtcctccaccgctagttccaagtggctttaaatgtggttcacgatcaccatgtagcctaaatacagggcagaatgctccatattcaaaccatctgattatgcattctctaaagtcttgatcatctggatttccaccatggaatcctcctatatcagttgtccaccatggtatacctgcaattcccatgttaagacctgctgcaaattgatttcttaaagattcaaaactagaatcaatgtctccagaccatactagtgctccataacgttgacttcctgcccatgcacacctaagaagattaattatattttcctgcccttctttcttcatgccatcaaaaaaagtttttgcatacatagctggatatatattacctatttgtgcatttggacctaagtgatacctataattctcgaagtcgtaaaccgagtattctggttcagcttcatcaagccaaaatatttttatgcctttatcatagtagtttttcttggcagttttccatacaaagtcacgagcctctggatttgttggatcatagaaaacagtatctcccaaaaagtccatagttgttctaattcccctatcaactcttactaaatacccttttttaagcatcgtatgataattttcgcttgtcttatctactgttggccaaatagaaaccattaactcaatgcccatatctttaagttctttaatcatagcatcaggatcgggccaataatctaaatcaaacttccattctccttgttttggccaatggaaaaagtcaaccactataactgaaattggcaggtttcttttcttatattcacgtgcaacgcttaataactcttcttgagtttggtatctcaatttgcattgccaaaaacccatagcataatccggcatcattggcactgttccagttgcctttgcataagcttcttctatttctgctggcgtatcacctgctgttataaaatagtctaattgcttagtagaatttgctatccactcagtaatattttttccaaaagtgacttttccaatagctgggttattccaaagcattccatatcctaaacttgataatacaaatggaacactagcttgggaatttctatgtgcaagttcaagtacgcagtttttcaaatctaaatttggctgttgatattgtcccatgccaaataacttttcctttggatttgattcaaatctcatagttaaagtataatcaccgccaagaataggcttaaattcacgtgcttctatctctaaagcactgcaaaatctatttacatttttcctatttcttacatactcctctaaaagaacatcatttttatcattataaaatgttatttttccttccttatcaatccttgcatgaatttttccattctctatatatgcttcgttattttcaatcttaatctcaatttcacaactttcttgtggcaataaggcccaatcattatttataaattctgcttgcttagtgcttcgtatgcgtaaactattttttccccaaggcttaatttgtaatgtttcacagtcatatttacgaattaatacatttccataaacttcaaaaacactatcatctaaattaatttccttattagattccatatatgaactctccaatctttgaataattatctctacttaaaatttgaataattaaattcatccttagaaacagcacctgctaatttattatctttatattagtcttaagactttcctatattttctttaaaagtatttattcctagcctttaacagcaccattagttaatcctccaattatatatttttgaaggaatataaatattaaaacaacaggcaaaaccaaaagtactccataagccattattgaattccactgtattccatacttgcccatgaaattatatatactagctgtcatagttctcttttcaggactggttaagaatgttagtgaatacgctaaatcaccccaagcatacaagaaggaaaatgctcctgtcattataagtcctggataagatattggaagcattatttttgtaaatgccgtaaatgtattgcatccatcaatctttgctgaatcttcaagctcttttggtaaagcaagaaaataagttctaagtataagaactacaaaaggaacagatattgttgcatctgataaaattggagcccaaagagtatctaataaatgtaaatttttataaactaaaaacattggtgtaagtaatagtgctactgggagcatctgagttactaagaagattaatataaatacctttttccctctcatcctaaatcttgccaagccatatgcagctggaatagccaatacacatgctaagatcattgaagcgaatgcaactttgcagctattacctagtgttactattatgctgctctttcctgtaaattggtctgtataactacttaatgtaaaatctttaggtataaaagttggaggtgatgcaaagatttcagcattggttttaaatgaacttactataatccaatatattggaaaaagcataatacaagctatacaaattgatacacagcataatattatatttttttgtttatccttaagaataatcttcttcattatccaatcacctcatcttcctttatcaatttgaggtatcctaaacttacgcagaataaaatagcaaacaatacattggcaacagtggcacctttactaaatgaaaattgcgtaaatgaaagtttatatgcaaaagttgacattagttcagtactattaactggacctccatttgtcataacaaatactaaatcaaaaactttaaatgtataaataaatccaagaactaatacagataaaatcgctggtcttaatgatggcagagttattttaaaaaatctctgaatcacattagccccatcaactttagctgcctcatataaatcatacggaatattacttaacccagttgttaataacaacatattaaacggaattccaacccatgaatttgttaatataactgaaaacattgaggttttactgtctataatccagcctattggttgtgctattagatgaaatttcataagtaattcgtttattatgcctccgcttgtactatacataaatttgaacaataatgcagttactgtcatcggtacaagataactgactaccataagtcctctaagaggttctgaaagcttaaatttcaaattgaaaagcaaagctagtccgagtcctataataaactgaattgatatacttccaatagtgaaaactaaagtattccaaatacttattggcattgctgggtctttaaacacttcaatgtagttttctataccaacaaatggtttaacaggctgactaaaagtcgttacatttacatcacgaagacttagaataaaattatatataatcggatatcccacaaaagccagcataaatattagtgctgggagcacaaatatgtacccttttctttcttccttaataaattcactgctatatttatttttcaaaattattttcacctaccttgcttcaatttaaaggtctccttcactaaattttaggcacctttagattttttatatagttagacaatttaagaattccacaaatttgataacattttaagtccatatcttcactagaaatcataaatatatttgtaaccacaaggatcataatatggaaaaaacatttgaaaataagctgttaaaggttcttcagcaatattttcatagcttttcggaatcaaaatatttatgatttaggtaagttaccacataaattcagttttaaagttggatatctatatagggttccatattgataacaatacatatcaactgtttcaatttcctaaataacagcaatattgaatttcataagtttgaatatcattgaggaaccctatatgggtaacacaatcataaactatacttagactatgaaatattttctaaccagaaatgagtaatatacttttgtaaccacaagggtcataatatggaatgtttcattggtaattttgatggatgtgattctttggctataagttgttccaaatgtgctagttcagagcttgttctttgaggctagcactttgggtgcaactttatagccttagaatcgcccatcataattacctagaaactggaacaaaagtatgttattcatttcggtgagttatatgcataagttcaggttttagttggttatctataaatttattttaatactgcatcaaccttaacctgtgcatcttttgctgcttgctctggtgtctttgcatttgtaaaactttcctgcattgcagtagacattgcatctgatatttcaggccattttggatgtggtcctcttggcatagcatattgcaattcatctaggaatacactcataacttggtctttagtaattttatcatcactttcagcaacatcttttctagatggaatgtaaccaaaatcagcacaatattcagtcatattatctttttgctgagtatatttaataaaatcccaagcttcagcttcatgatgacctttaatgataccccagttttctccacctaaatctgatgcaaatactttatctttaggaatttttacaactccccaatttaggtttggtgcatccttcttaactgtgtctataatccatggaccatctgtaatcatagctgctttattagttacaaattgtttttctaaatcattttgtgtccagtttataacttctttactcattgatccattttttataagatcagtgagatattgaagcgaacttattcccgcatcacttccaatttcattaaatttagcgcctgttgaaagaagccatggaatatattgaaatgttccttcttcattctttggtgcagctatagctaaaccataagtatctccttttgtcaatttcttagctgcagtctttaattcatcaaaagttgtaggtggctcaactcctgcagcacttagcatgtccttattataaaataaagctaaatcattacttccaagtggaattccataatactttccatctaactgacatgatgaaatcggacctgggtaaaattgatctttaccatcataggaattcattttgtctgtaatatctgcaaataatcccattgccgaaaatgaagccatatctggattatcaactaaacctatgtcaggtagcttgtcagcaacaagacctattgtaaactgcttagtaagttcagctcttggtacaaattccacttgaacttctaccttatcttgagatttattatatttatcagcaagattttgcattgcattttgttgttgctgcccatcaaaatagtgccatactgtaatcgttgtctttcctgccggatcagctttagtttgagttgcgcccccaccactgcttccacatccaataaatatagtcgccgacattgcaatagctgccaaacaagccagtaactttttagtttttttcatattatttacctcctaaattcttatgaataataacgttttctataacttaatattacatcttctaaattacttctaatattctattatcatgaaaaaagtgtaaaatcatgatattaattttacactttgtctttaagcatataaaataacaaacatacggacttattatctcttatcatttcttaataaaatttcatatattcctttggtgacatacctgttgattctttaaaaactttgcaaaagtacttagaatcactataaccgaccttctctgcaatttcataaatttttagtttattacttcctaataattcctttgctttatgaattctaaactcttttaaataatctgaaaaactttttccaagttcctttgtaaataacctacttaaatattctggagttatattcatcccacttgctatttcttcaagagaaattttatcgctataatactcttttatataatttatagcttttcttacaatcaatgaatttactttagttccctcatcatttctttcacacatcttacggattacataattcagccgctctttcaactcatcaaatgtaaaactattcttaattgaatctaaaacaccttcattattaaactcggtgtaaagattgctattacagcttttagccacagttaaaattgaaaaaatatacttgctgctaacatcgattatctcgcatgggtcgtagatgttttctttcaaatatgatataaatcttttattaatatcagctaactttttctgatcattgttttttatggcttttagcacttccttttcaagatctcttggataattacaatgatttatttttaatttagatattagttcttcataaatcacttcattatttccaaatgaaataggccatctagacaatctttgtagctttttaaatgaacttttaatttcagatagttcgtttagattaataatactaatagtagtatttaggaatcccttctgcctaagtgaaaataatatcttatgctttagcatttttataaattctaagtaaggtgttttagtaattactaaaataggcaaataattgtactcttttaagatagagtaatagaaatttacaatattgtaattcttcatagcttcataaatctcttttattataagttcaaccttatcttcgtatttatctctaagatgcaaattaacaacatatatattttcattttgctttactttactttcaattattttgtaaaaatgctctaaattttgtcctttatttaatagtacttgtcctaatatttcttccttaagtataccttcttctaaaagtgcatctttttccttacttaaattaagctttttttcaatatcctccatggtattttttaaagcagtataagttatgggtttcaataagtattcattcactccaagttttatacctttctgtgcatacttaaaatctgaatatccactaagtataataatatatggatcttgaccacaatctttaattttctgaagcatatctaatccatttattttcggcatttcaatatctgtaaagataagatctggattatgctctttagctaaaaggaaaccctgctctccatcagaagcctttccacaaacgatataattttcattaatctttcctaataagttccccagtccttctctagcattaatttcatcttctacaattaaaattttcataaatatcccccttaaaatatcaatgaaataatcaaagttattgtagttccttgtccttttgcactttcaatactaaacttagcatcttcaacataataaatctttatcctgtcatatacattttttatacctatattttcatcttcatctttccctgattttatattattaattatgtctttgagctttctatcttctatacccaatccattatcttttactacgatttttacatacttatttttaaatctatttatgctaacttttaatattctttcactatcatatcctttaaatccatgaataattgaattttcaattaagggctgtaatattaacttatgaattctagcccctaatatattttcatctacatctaaatccaatacaaagctattattaaatctaagttgctgcaaatatacatatttcttcaaccattcaacttcatcataaatagtcacttccttattaatatcacctatgctatatcttagtatttgcgcaaaacttccaatagtatcactaacttcataattctcatttttaattgccatccagtttatacaatccaaagtattatacaaaaagtgaggattaatttgagctacaattgcctttatttcagcctctcgtcttttatttgataattcaacaataaaattactttgatcttttatatctcttatcaatatatttattgtagacaacatttcattaaattcgtctcctataaatgacatttcatcttctgtgcttagctttatttttacattgaaatttcctttcttagcttccttcattccactgacaataattttaactgactcatacaatttatttgagaatattataataactattgttaagattataagtatcaatcctagaaatacaaaagttaaatttcttaataacttaacttcataaaataagttatctttatcaacaacattaattactttccagccaacactatctataggaatactgctaacagatatatttctattcttaaaactcggtattgaatatattaattgatttagtgtttccatattatcagtatcattaatctcactgctagaataatcttttacatatgtcccaatgtacttcttatcttgaaatgatataactctcccatcattatcaactattacagagcacatattaagcttgtcttcctcaaagtcctccttatccatctgaacattacaaacatcaaatagaatttgttcatcaaaactcataataattatcccaatttcatctttagttctgatatctctaacttttagtcctatgtgaaacatatactcagattttccatgaataaagctattacaagttgtaggtaatattacgggaatattactatttaagatttcagaataaattttgcttttttcagaattactatattcttcccatattctattattgattccttgattacctttatcataatatacatttcttccattgttcccaacaaaggttatagctctaatttgatttcttgaataagaataagatccaaaggcatctctaatcttattaatagacgctgctttttcaaactcatttccgtcgttaaacattttctctaattctaaacaatcattatctgctgcaatcctatataaaatatccttataataattcatatcagtttctatgttagtttttatgtaaaataaatttctatctgtaagatttgtaatcttcttttctagataatgttgtgacagcttatataaaaacacttgactaagaaccattggtataattgaaataattataaatatgcttaacaattttgcttttatactataacgtttccaatttaaaaaatatctaattgtattcgtagcattgttaaaaaatttcattatttataatttcaccactctttaggcacattgaaataaatagcaagtccaaagtttcttttaatgcttttccttagacaaggcaaggtgatatattatcctcatggtgcccctctattaggtgaatttgtcaatgtagcatgatggaacattggcttacaaatgggctttttatttatttaattgtgtctcattattttaacttaatacatacattatattccattattttactatcaatcaaccgtacaacttaaaattcttttcaaaaaagttaagaatataaaaaggtaacaatgtaactttttatattcttaacttttttcatttcttactttttttcttttttaattgtaaaaaaggtttattggaaactatttaacttttttacttctttcaaatttatatttttggggctatatataagttatagaaagcttagttcatcacggcttatcataatctatcagataccaataatactgtaaaaaggatggtattaaaagaagaacaaaagcaaaactgctagttacttaacaaaaatttcgtaactagcattcttatttagcttattaaagatactcatttaactcttggtgggtttacatcatcaaaacttccaataacaaaatatgaagcctgagcttgcacaaggagcttctcatgctcatcaaatattttgcatgcacacctcattatgttttcaccatcactaacaacctcacctactgctgtaattgtgcttcctgcatttacattttttatatagctaatacttaaatctgtagttactatacgctttcctaaagttgtacaagaaactcccatgacaacatctgcaattgacgccaaagttcccccgtgtatgtatccatatatattacaatgcctatcaataattttcatttcgtatataacttttccctctgtaacttcaacaattcgaggatcaagaaaattttcaagtatagatttattataattttcctctaaataactttttaaccaaacaagatgttcttttgacataataactcctccttcacttccacgcattgtccaagatatctttttaataacctttaaagcaattactagttttacctttgttttacgcaaatatatattattttaactcaatcttgtattacgtataagattatagatatcccactaagaccttgatttatacatatagctcgccaaaatgaataacatacttttgttccaaaaatttatgaaaatatatttatgatttctagtgaaagtactaatttaaattcttagcaactttgtgaatatgttcatctaataaatctaatttttaatttatactttgcaataaatactatgctagaaagcagaaacatttttatgcagcaggcattgaaaatgagctgttaaaagctcttaattgtaggttgttacattaatgcttgctcccaatttcattgtgacaagcattaatggtgcaacctgcaatttagcactttcagcgaaattttcatagtcctgtgaaataacaatttttctcctttcgcggattatttcataagtctaagtcatatattatttatctatattatagcaaacaaatcaaatatatcctaactcacaactaattcctagaataaaatacaatgtgcttcatattaattatgtaattaaacatatacatattttttatatatcgtctaagcaagcttaatttataaagttttacctaaaactatcgtttaataaattcaaacactttgatagagaataccttgtattatttagcttacacaaaaatccaagttgaatataattgggatttttattgatttttataggaatattatataaaatgaattagtagactaattgataacaatattcaattaataatcaagaggtgaatgatttgaatataagaaaaaacaaactattttttatatatagttttatatccttaattaattttactttcaatactaaggtttttgctgcagtaaaaaacagtataagtgaagacgctcctttatacactttcataaattttactagctatatttataataattacaaaactttcatattcattattttgggtattatttgtatatcattattagatgctttttactgccttgtcgtaaaagcaagagaacagtcaaaatatcttaaagacttagatttagaacgcgaaaaatattttatagttgttgaacaattaaatgatattatctttgattttgacataactgagaaaaaaatcttaagttcctctaagtttgaagaaacctttggatggacattaaatattcaagattataataaaagttttttaaatgaattgaaaatacatcctgatgataagatattaattaataaaatcaccgatgacatgaaagctttaaacaaacagtccattataaaacaaatccgactaatgaagagcaatggtgactatctttggtgtgagttaaaactaaactatatacaaagagataataagattgtcagagtaataggtaaaattactgatattgaccatattgtaaaagaacattctatgctaaagctaagatctgaatatgatcagctcacacaaatatataataaatctacattctatgaaaaagttaaaaattatatcatagataacaaaaatgataactgcatgctgatttttatagatttagataattttaaagctataaatgataatttaggacatatggttggtgatgaagtactaaaggatactgcaaataaaatttgtgacgtctttaacggtacagatgttattatttcacgatttggcggagatgaattttgtgtatttaaaccaagtcattctatttcatttataaaagataaaattagtattttatgcaataaccttaatgctacatatatcggcaataatactgaaataactgtatctgcaagcatcggtgttgccttttaccctaaacatggagatactttagaatctttaattcataaatcagatatagcattatacagttctaaagaaaatggaaaaaatcaatttaccatatacaacaaaaagcttgaaattgaatgttgaattaaatctaagattaagaaatcctcgaaattactatccaggatttctcaatttttagtttgaaacaaggaataaacgtacttttatcaaaccctatatacctaaaatacctattgagtatcctataactccaaatatcattaaaccaaccatacatataagaggagatacttttttctggagtaaccagtaaattagaaaagtcagcattaatggtagtatattaggcattatgttatctaactgctcctgaactgtataggatgttactgaacttccttgcgttaaggtataaagaacaaatggtacttttattatagtccactttgcaactagtcctcctattacagtataagtaagtactactaaggcgcttctatattttggtaccgcacctttaagtttattaattatatttattccttctctataagctatcataagtccattatatcgtattattaatctcacaatattaattattataaaaaataagattggtcctgcgacatttccgctaagtgatattccggcgcataacgctgctattacaggtcttataattccccatataattggatctccaatacctgcaagtggcccggctagtgctattttaatctgaactattcctgattgatctactttttcctgcatactttcttcaactgcaatattagctccaagtattacatttgaaataaatggttgacaattaaaatactctaagtgaacctttacagctttttgtaactcttccttggttctatatagtttttttagaataggcatcatgcaataacaataacaaagattttggagccgttcataattccaagatatttgataaaattgacttctccaaaaaactctcattaaatcatttttggtaactttaacttttatggtgtcttcttgattttctataaaatgctctctctttgttctagtcttattacttgctttttcgatcatattagaaatttgtaaatatattagtgctaagctaattcccataaaagttaatccaactaaggtcatctgagaaaatgtcattactaaaaatcccattaagaaaaatgcaatcatttcttttacatttaaaattctaagaatcattgcatatccaactacaactaaaaagccactagacacctgaagtccttttgttattgcttctggaacataatttaaaatattattcaatatatttgcatcagcaaacaatgcgactaacattgctggaatagccatccttaaagcacttggaatagctgttgtaaaatgtgctgctgtcaccttccaaagctcacccttatctacacccttttctgcccaatgcattataccaacatctatagttcctttttgcaatataaaaagcatttgtcctacaacagctaatggaattgcaattcctattgcaactcctatactttgttttccaagaacgcaaagtataactgccactatggaagataaagttgcatctggtggagttgcaaccccaatagtcatccacccaagagcaattaattctacctgggctccaattataactcctgtctttatatctcctaaagcgattccaataagtgtagctgtaaccaagggtctgtgagtttgaaactcctctgaagcagatccaataccacatattgaagcaaataaaaatataagtaaggcttgtgttaatgacattattaccttctccttgcttttagagtattaaaaaactctgtcttcttatctgttggtagaatccttatctctatttccaccccagaatctgcaattttcttcaatgcctctatctccttatcatctaaataaagattggtatttattttttctttatctttcttaaatgacattccacctaaatttagactttttatcttaactccgccttctataaactcaagaacttcaaaaggatttccaaagaccattattacatcttcatattcacattcctcttcatatagttctaaagcctttaaagtgtcacaaaatattatttttatatcttcaggaacggataattctataaaagtttttcttatatcattttctgcaacttctttattaacaactattatttccgttacatcttcataagtacaccaattatttattaattgaccatgtaccagcctatcatctaatctaactatttttagcactataccgctcctttcattttacttttgtatatcattgtaacgctgccttatattaattacaccattttgaccaaaatgttcagctaaagaagatattttctctaaatcctgacccatatatggtattatttctaaaatcattggcatattcatacctgtaattatatttacgttttttctgtccataaataagcacgccgcattatatggtgtcccgcctaagatgtctacaagtattaaaacttcatccacatttagctcttcaatagtcctatctatcttatccttaagactttctatacttttatctacttcaagacagatagttcttattttttcctgcttaccatatatcatctcaactgaatttattagtgctttcgcatagcttccatgtgaaattgctattataccaaccattttaatacacctcaagatatgtttattaattatcttttatatattaccacaccttgtgctactttgttaactattcctgactcacaaattaaatctgtcttagaacctcttctaatagcatttagtattgcaaaactttgaagatatagtgaatactgaaatactatatgactatcatccttatacttaaaattatttttgttgaagtagaaatagtaatcacagtttttatctatttcttcgtcataatccatagaaatagcagctatagtactatttattttattactatagcattcctttaaaacatctaactcgtattttatactgtgagagtcattgctaaagaaaaatgatattaaacactttgaattcattgcaagctttggaccatgtctaaattctagcattgagtggaattctgtacgttgaagtcctgttgataattcacttatcttcaaacacatttctgatgctaatggatttaaagctccagttccaagtgctgctactgtatcatatattttattgcttacagcatgagctttataaatatcttcttttaaaaacctggcagcatcttcaataatatttttaaacatctcttcataataatcataattattaatgtcaaagatcaaaagcagatactctataagaagtgtgaattctcctgttgcagcaatacttttatccttagtccttggaggaataggaatatataagctatttttatcttctccatatttacttataatttccccttttccattgcaaattataagtaattgatataactctatacttttcttcttgaaaatttcaaccgcttctaaaccctcaattgtatttcctgatcctcctaatgatactaaaagcactggtgaattatccaaaatataattatcttcattttctatgagagttgttgaagctattgatataacttcccttttagtaattcttctcaagcaattttctgttattgcagctgcttttgcagagcttcctgctccaactaagtatatcttaagtccttctacttcctctatcttatttagaaaagatcttattttatctgaattcctttttattgtttctattccctcttcccataattctaattgtctttccatttctaaagctgtatgatatccatcaattctctttaattcatcttcttgtattcctagaattctcattaataatcactccttagtctcaatctatctttctgcatttataaatctaatcgttgacaactttttatagttatcatttgttaaaatatttcttccaaaaaagcttaataaaagtcatctctataaaatgggactgcaacataatctatttcattagattttgtaacagtcatcattctaaagttcttaattcctctttattagtttatatcccatcatccatagtcgagccattattatctgctgaatttgttgctatattaacttttgtaaatcttactgctgtatctttagtagcatttacaacgctatctgctaattcaacaatccccatagaatctttaagtaaaattccttctagtattgcacctatattacatccagctacaacttccatattttctttttcataagaaagttcaacacatactttaaaaggtgtccctcctaaaatgtcacatataaatagattttgatctgcttcattattaactaaagaattaactatcttgtcctttaaagtatcatctgtatcttcttctaaaaaatcaataaattcaactctttcattatgaccagacagaagctttatagaactttcaactcctgtaccataattaccatgtccagttacgattatattagtcttcattataatacccccactaatgatagtaagattgctaatgcaaaagttactaaaattaagatagttggattaacatttttcttttttaagaagtaaaacataagtaatgtatatcccataggtagtatattaggtaatattttatcaacaaaatcagtttgcagtgatatggcatgatctgcacttattgagatgcttggaagtaaagtgatatgaacataagatgctatcaatccaccaattacagtaactccaagagttgttgctgctttagaaatagattttgagttttcctttaatacatcaatagctttaactcctagtttataccctgcacttgcccatattatacgagataagaatacgcatacataaacaccaaagaacaatataggtcctaaaatacttccttgacttgcaaaagatgcgctgatacctgcaactattggtaatagagtaaaccaaagaagcgcatctccaatacctgctagtggtccaaataaagcaacctttaagccttttataagacttctatcttcgctattttcttctagtgataaaactaatcccataagaaatcctaccaaagttgggttagtatttataaattctaaattatccttcatggattgtgacactttttctttatcattattatgaatcttctttaagaaaggtagtaaagcacaagtccatccagccgcctgcattctttcatagttgaaacttgcttgaagcaaaactgatctaaatgcaagttttctaagatctttctttgttaatttattattagattccgtcttcataatcttctcccccttgatttgaatttactacatttgcaacttgggctttacttttatcatttacatatccatataaagcaaaagctgttcctattaatgctactggcaataggtttgtaaattgtacaaatgaagctactaaaaatcctataataaggaatggaacatattctatcttaagcattaccctaagtaatagtccaaatccaactgctggtaagattccacctgctatttcaaatccgtgttttaaccactctggcatattttcaactaaagttctcattggttcttgagcaacatatgtacaaaggaatacaataacaccataagttattccaactataagagttgttgttatattcaatcttgtaaatgctgcagtatcgccttcttctgcatacttatcagctttattcataaatactgaaaatgctgaatagtagaaaagtattacatattgcattaagaaactaaatggtagtgctagtcctattgttgctttaacatctgctccagttgtatacgcaataactgttgtcataatacctgcaagtattggattaggtggctgtgttcctcctactggagtaagtcctgcaaaagctaattcagtaagtcctcctgcgataagtcctgttgttatatctcctaaaatggctcctgttaatgtacatacaattattggtctaaatatataaagtccttctaaccagaaatcaaatccaactatcattgccataattgcaagaagaacaccttgtaataacgttatactatgcattataattcctccttttattcaatattagtcttaatatctccaggtgtatcttgtgcaaatacttttacaccctttgattcaatatattttagatcttctatatctttatcatctacataaacctttttagtaattgctctctttccatctgaaaagtgcatatttccaacatttaattcctttataggtactccaccatcaactaattttcttgctacctctggtgttttgcatactatgaaaatcttttggcttggagacgctttgtgtataacatctatagttttttgaatagtgaaaaatctgattccaacccctgaagattctgctgtcattgacattaattgttgttgtactggatctgatgctgcagtatcatctacaactactagtaaattagctcctagggatgtcgtccaagtaacacctacttgtccatgaactaatctgttatcaattcttgtcattaatatatttggcatatttaattcctccttaatctttatgcctatatataaagcaagccccatgccaagtagtgtacatattactacctaacatggggctttttataggaaattatccattctttcatctattttatctttaaatacagcctaaagtcttattattgcttatttattaaaatttctaaaaactttattaaagatcaaagtttttaactttatttttaatactgtcatatataaaacctatttctgatataggaatctctactctatagaagttttctattacactaaaagcttttctcgtcatttttataaagtgtacatgacactgttcgaaatcctcacaatctctgtaattcataataggatcttttattactaatctttctatcatacagcttatatgtatatataaacttatctttaaatcattttctaatttaaatcctaggcttctttctaaattagtaagagcgtcttcgacttggtctactattttatctgggtttaatattgtaagataatttaaaacattttctaaggtgaataacttaactgcttctttatttatcttttcaataatgtcattatctacaattccttttaatgtattagatagtactgaatctgcttttttcattataaggttctccaaagatataaaaggaatagtctctatctttggatcatttgtaccaattatgagttttacattatattgtttaaatacaaaatcttcttttccattttcttttaaactctcataatcataagcgacaacctttacttcatcttcgttaaaacaattatttaacaaatcttttattttgcttgctgttccaataccagttatacaagttgttattattacatctaatttctttttactagattctatataatttactttacttatatttttcttagaggcttcttctgcaatttgttttaatggctgtaagctaagaatcctacttcctacatccaaaactaacttagtagaaacattatctactatagctatatctccgtatatttctttttccaataatatataaatagtttcaagagaacccatatctacaagtattaaaagtccctttgaagtatctattgtctttacatattctaagatcttattacttatatctaaaggtgaactttctataggcatatcaaacggctcaaaaatatatttaccaaacagcctgttagcaacacctgcaatgctgcttgcagttgagtggccatgcgctattattattgcattaacattattttgaattgatttatccaatgatcttatatatattagtaaataaatttccgcagttttatttatctctaaatctaaattatcatgaatatctctaattaactttagaaccaacttatattccttattgaactttttacttaattgctcgattagtgtaatatcttctttagtacatccttcattttgaaattctacaaaatatgttataagattagccacaatttctgaactattagctaaataatctattccataatttaaattcataaaatgcagagtactttcaactgctttttctatagacttataaatcacattttttgagtttctatatttttcattaaaaactatatgatcaatcaagtcattaaatatttttataccattaataaaaaactcttcttctgttattttgctttcttccaattccttaatatatttactcaattcttctgtaatttctggtgccttatttatatgcgtatttaaataatctcgatcattcttttccgagcagcttataaacatgtcatttatatttaggttattaaaacttatatcctcatcctgctctattatatcctttggaagattatttatttttacttttaatacttttgttcttttctcctgagtattatttaaggcatttgcgcagctgagctttatagcatttataagtttaccaatattgccatgagcattgctattaatcagtatatttataacctgactattaacaataatatttctatttatatttaaggcttctctcttataaaaattatctataagatctagcttttcctttaagggtctttctttaaagcttggtatctttacaattagtggtatacgccttaaaaatgtctgaagaaatttattctcaggattctctgtagttgcaaaaatcaaccttacattggcgtatctttttttctccgtttcaccaagccttctaaatatccccttatctaaaaataagaataatttttcttgaccttctggtggtaatctatgaatttcatctagaaatagataacctccatttgctttttctataagacctattctatcactatcagcacctgtataagcacctttggctgatccaaaaagtatagctgaaaataactctgggttatttgcatattccgcacaattaaatatttcaaaaggagcttcttcttttatatagctacaatttctcgcataatcatataccttttgtgctaaaaaactttttccaactcctgaacttccaataagtaaaaacggtaatccatttggtggatatgaaacggctgatttacactgctgaacgacatcctttaagctgccgctagcccctataagttccttaaaattatctatatcattattagtatttgagctaacttctttaatataatcagaaatcagcgtaaatctatcactgtcttcttcatacacttccttgcttataaagtagacaggtctcttatttacttttattgcttcttcctctttagtcagctcatttaatacatgacttactaaatttctttgaagcccaagtttatctgctatagtaagagcatctattccgtattccatgcttccatctattttaagagaaagttctttcaactttattctaatcttttccttgttagtcataggcctgcctcctaactctttagtttatactacatatactgacacctatatttatatacattaccacttttagttgctttaacattgtatctaactaaatatagaattcggattacataataaagtataattaatatatatgttgcaattcacaattacgactaaaattcttgcaatatctttagaattattatgaataattatttttgcaatatataatattatttaatgtaatttcttaaaattttactaaaatcagcttttataatatataccaacttggattttaacattgaatatatcatttatgcaaggtcaaaagtctagaaatttcaataatttatcctattattcatgttaatcacttttttggctagcaaatgctttaatcttcaagtattttattatataaaaaataagccctagataaactagaacttatttttcaacttggtgactcctaggggaatcgaacccctgttaccaccgtgaaagggtggtgtcttaaccgcttgaccaaggagccatattaagttttatttaaatggagctggcaataggaatcgaacctacaacctgctgattacaagtcagctgctctaccgttgagccatgccagcatatttaaattaaattggcgactcagaaggggctcgaaccctcgacctccggcgtgacaggccggcactctaaccaactgagctactgagccgtattatggtggctcgaactggaatcgaaccagtgacacgaggattttcagtcctctgctctaccgactgagctatcgagccatcttacctcgcaacgtcctactctgccacacagtctcccatgcagtaccctcggcgctatagaccttaactttcctgttcgaaatgggaaggagtgttacctctatgccatcatcacgagatgcataatttacagaaatcttcgatttcgtgtaaattagcactcagcgaacgaatgtgagtcgagtttcctttgaaaaaagactcttagtttacgcttatactacatttacattaatctattactgtaattattcctttttgaaaaaactttgttctttcaaaattgcacatagtttctttaatgtatattacaacttgattatattggtcaagccctcgacctattagtatcagtcagctaaatatgttaccatacttacacctctgacctatcaaccttgtagtcttcaaggggtcttactagcttatgctatgggaaatctcatcttgaggtgggcttcacacttagatgctttcagcgtttatcccttcccgacttagctacccagctatgcttctggcgaaacaactggtacaccataggtcagtccatcccggtcctctcgtactaaggacagctcctctcaaatttcctacgcccgcgacggatagggaccgaactgtctcacgacgttctgaacccagctcgcgtgccgctttaatgggcgaacagcccaacccttgggacctacttcagccccaggatgcgacgagccgacatcgaggtgccaaacctccccgtcgatgtgaactcttgggggagatcagcctgttatccccgaggtagcttttatccgttgagcgatggccctcccacgaggtaccaccggatcactaagcccgactttcgtccctgctccacttgtaggtgtcgcagtcaggctcccttctgcctttacactcttcgaacgatttccgaccgttctgagggaacctttgggcgcctccgttacattttaggaggcgaccgccccagtcaaactgcccacctaacaatgtcctgtcaccagtttcatggcatccagttagaacttcaatactatcagggtggtatcccaacaacgactccaccaaggctgacgccctagtttcccagtctcccacctatcctgtacagacaataccgaaattcaatgctaagctacagtaaagctctacggggtctttccgtccaatcgcgggtagcgagcatcttcactcgcactacaacttcgccggatttgcagttgagacagtgcacaagtcattacgccattcgtgcgggtcagaacttacctgacaaggaatttcgctaccttaggaccgttatagttacggccgccgtttactggggcttaagttcacaccttcgcgaaacttcgctaagtgttccccttaaccttccagcaccgggcaggcgtcagcccctatacatcagctttcgctttagcagagacctgtgtttttgttaaacagttgcttgtgcctattctctgcggcctgatttctcaggcaccccttctcccgaagttacggggtcaatttgcctagttccttaactgcaattcttccgtcggccttaggattctctcctcatctacctgtgtcggtttgcggtacgggcactacttctctctctagatgcttttcttggaagcatggaatcagatacttcggttccgtagaaccttccccatcacgcctcagaattgttggaacggatttgccaatcccaactccctaaacgcttagactagcatccaatagctagcacatcctatccttctccgtcacaccatcgataataacgattatagtggtattggaatatcaaccaattgtccatcgactacgcctttcggcctcgccttaggtcccgactaaccctgagaagacaaactttactcaggaaaccttagatattcggcctgtaggattctcgcctacatctcgctactaatgccaacattctcactcgtaatcagtccaccgctccttacggtacgacttcagcccgattacgacgctcctctaccgctcacgcataagcgtgaacccgtagcttcggtggtaagtttgagccccggacattttcggcgcaggatctcttgactagtgagctattacgcactcttttaatgagtggctgcttctaagccaacatcctagttgtcttagaaatcccacatccttttccacttaacttacactttgggaccttagctgacgatctgggctgtttcccttttgaccatggaacttatctttcatagtctgactgccggactgatagtatgtggcattcggagtttgataaggttcggtaagcgctatgccccctagcctattcagtgctctacctccactactcacattttccgacgctagccctaaagctatttcgaggagaaccagctatatccgagttcgattggaatttctccgctatccacagctcatcccatgctttttcaacagcaacgtggttcggtcctccacgaggttttaccctcgcttcaacctggccatggataggtcacccggtttcgggtctacagcatgcaactagtcgccctattaagactcggtttcccttcggctccgtaccttaagtacttaacctcgctacataccgtaactcgttggctcgttctacaaaaagcacatcatcacacacataaggtgctctgatcggttgtaggcacatggtttcaggttctatttcactcccctcccggggttcttttcacctttccctcacggtactgcttcactatcggtcatcaggtagtatttagccttgggaggtggtcctccctgcttcccacaaggtttcacgtgtctcgtggtactctggtgcagaactgattatcatagttttcacttacgggactattacccactgtggtccaactttccagttgtgttcaattaactatgatttctcgttatgttctgtccgcaaccccagagataaatctctggtttgggctctttccttttcgctcgccgctactaagaaaatcgatttttctttctcttcctccaggtacttagatgtttcagttccctgggtataccttcataaagctatgtattcactttatgatacatggggtttcccatgtgagtttcctcattcggaaatcttcggatctctgactatgtgcgtctacccgaagcttatcgcagcttatcacgtccttcatcggctcctgatgccaaggcattcaccatgcgccctttgtagcttgacctttggttcgctcgcttattagcaccaataacttcgtcagctgcgtgttttactcactcacgtacatgaagtacgctcgcttcctaaaactcttgctttctcgttcttgtcactactaagcttcgcttttagtaaattaatatattttattcaaatactttaacttacttaatcatttcacaaagaatatttattcttggctttgttgtattttatatacattaaatctatgtgcaattttcaaagaacattgaaagacttagtctttcaaaattgaacagaacaaatacttaagtaacctttgagcaagtattttatattttgatacataataatgtatctgtactagccaaacatcatgttagtctagatttctccatagaaaggaggtgatccagccgcaggttctcctacggctaccttgttacgacttcaccccaatcgctgaccctaccttaggtcgctgcctcgcttgcgcgttagctcacgaactttgggtattgccaactctcatggtgtgacgggcggtgtgtacaaggcccgggaacgtattcaccgcgacattctgattcgcgattactagcaactccagcttcatgtaggcgagtttcagcctacaatccgaactgagactggttttaaagtttggctccacctcacggtttagcatctctctgtaccagccattgtagcacgtgtgtagccctagacataaggggcatgatgatttgacgtcatccccaccttcctcccgattaacccgggcagtctcgctagagtgctcaactaaatggtagcaactaacaataagggttgcgctcgttgcgggacttaacccaacatctcacgacacgagctgacgacaaccatgcaccacctgtcttcctgccccgaagggcttccccgattaagggtaattcaggagatgtcaagtctaggtaaggttcttcgcgttgcttcgaattaaaccacatgctccgctgcttgtgcgggcccccgtcaattcctttgagttttaatcttgcgaccgtactccccaggcggaatacttaatgcgttagcggcggcacagaggtcatgacaacccctacacctagtattcatcgtttacggcgtggactaccagggtatctaatcctgtttgctccccacgctttcgagcctcagtgtcagttacagtccagaaagtcgccttcgccactggtattcttcctaatctctacgcatttcaccgctacactaggaattctactttcctctcctgcactctagatatccagtttggaatgcagcacccaggttaagcccgagtatttcacatcccacttaaatatccacctacgctccctttacgcccagtaaatccggacaacgcttgccacctacgtattaccgcggctgctggcacgtagttagccgtggcttcctcctcaggtaccgtcattatcgtccctgaagacagagctttacaatccgaagaccgtcatcactcacgcggcgttgctgcatcagggtttcccccattgtgcaatattccccactgctgcctcccgtaggagtctgggccgtgtctcagtcccaatgtggccgatcaccctctcaggtcggctacgcatcgtcgccttggtgagccgttacctcaccaactagctaatgcgacgcgggtccatctcatagcggattactcctttaattgctatgccatgcggcactacaatcttatgcggtattaatcttcctttcgaaaggctattcccctctatgaggcaggttacccacgtgttactcacccgtccgccgctagagtccctcccgaaggagttcatctcgctcgacttgcatgtgttaagcacgccgccagcgttcgtcctgagccaggatcaaactctcaattaaaagtttaatcttagcttactcaaataaaaattgctggtttacttaaatgtatttatcttattctgttcaattttcaaagaccaatttttctttctaaaccttcttgttacaaggctttacaagtttctgtcgcttctgacagcttactcagtatatcatcgctttcagactttgtcaacaacctttttttaaaacttttcaaacatttttctcaaacattttatcggctttaagttattgaattctgtgcttttcagcgacgaattacatcttaccatcgttatttaatcttgtcaacaactttctcaaaagattttttcctttcctataggtatctaactaagattaagttgtttctaagattatgtctcttagcgacgtgttttatcatatcatctgtattatgcttatattctttattatttatccatttaatgatattattcatagtattcgtcatttttctttaaattcatagtttttatttatattgacacactagaagtagttgtccacataatatctattatagttaaatatgtatattatagctttcattataacatttataggctcccctatatgtatatctactatttatataatatctgcacatctactttgtagtctaaattcctaaattaagctcattaggaatcacaacccatcctatagaattaaaagctacttccatatcatgattgctgctttgcgtaaatataaaaccagtttttattccaatttccttcaatttggctaaagaacgatctaacattcttttttcgatttcattaactctatattcactatatatagcaatatgatatataaatcctcttataccatcgctgccacataataaagctccaattaccttcccatcttcgttgcatgctacagaactagcttttggattcttttttaaatatgtgattaattgttctttagtcacagactcttctaaaaatgatgagccaaaaatatctctccacagtttaattacttgttctatatcagattctttcatagctttcaccactatagtattattcatttaccccactccatccttattcttcagtattatatattatgttgcagaaataattcttcatcataagtctaaaaatattgcaaaaattttagccatacttgtaaaatgttcattgtaaattgcaatatatatttaatagtaacactctattatcctattagatacataaatattataaatattgttatatatttataatagataaactaattataagttacataatatctcttaactagaagtaagcaaggggttaaattcaaataatatcctgatcacattttatcaaataaaatatcaataagacttatatatttgaaactaaaaaatgctttttacatagtttaatcaccacgtaaaaagcattttattatgttgaattaatttatatagtttaatatctgaactatatatctacagatatttagagccctaaaattataattattatacttaatttatagataattcaattataagttagatttatactatgaaatatatcccaactagaaatgggtaatatacttttgtagaatgtttcattggtaattttgatggatgtgattatttggctataagttgttccaaatgtgctagttcaaaaagtgagaatcgaaattttatatttcattcttcgaactttctctgtgagcgcttgttctttgaggctagcactttgggtacaactttatagccctagaatcacccatcaaaattacccagaaactggaacaaaagtatattattcatttcggtgagctatacgcttaagtatagattatagttggtttatctatatcttaaatctagctaattcttctcctaatttttctgaaagtgattgaagttcctctgcatgcttagtgaatctaatcattgcagaatctatttcttgtgttgatgcactaacttcctctgatgcagctgcagtttcttgtgatattgatgaaatattttcaatttcagctattacactttgtttacttctatttatatcaactacagatgcttttacctcattaaccttagcactcattaccccaattgattttattatctctttaaatatttccagtgtcttacctactgctaattcctgttcttttaccatattctcagcagttacaatagcacctgttgctttatctgacttattccttatatttacaataatctcctttatttcttcagtagacactttagattgttctgcaagttttcttatttcctcagccacaacagcaaagccttttcctgcttcaccagcacgagctgactctatgcttgcatttaatgctagaaggtttgtctgttctgttatttgagatattttttcagatatagtatctattgttttagtattttcagccatttcttgaactatttcattaacttcatctgtagcattcttcgttttatctgatttttctatcaaagtgtcaatcatagatagtccttttgatcctaattccttagtgttttcagaaagtttgtccatttcatgtgagttttcattaatttcatccaacttacctgataactcattcatttctaaaactccatgctgagcattatgagactgattaactgcaccatgtgaaacgccttctattgatttggatacttcttctattgatgctgttacctcttctgacatattcgctaggtttgacgatgtctctaatactgttttagatgattctgtaacattttctataagctttgatatattagatatcatatcattaaaagattgtgacagttccataaattcatcctttgtagataaatttatcgatgcagttaaatctccctttgaagttttttcaaatacttcttttagctttttaatattttgtgctatacctttacttaaaaataatgatagcattatacaaattattaatataactaaagatatgtatactgttgtcgcaagtattgaatctgtatcattagttacttctttctcatcaagagtagctacgaccttccatccagtagtagggtttgtcccatatactccaaatttctttgtattattaaattcatatgttaaaaatcctgcattattattttttacatcttgccaaaatgattggttagatgctacatctgttccaattaaatctttattcttatgtgctatcatatttttaccatctatatctgaaacaaatatatatccggtattccctattttcttagttgatatcttttctgtaattgcatctaaagatacgttcattgcacatacaccaactaactttccatctttttctactgccttagctatagctacaacattttttccagtttgggcacttttgaatggtaaagttattataacttggtctttatgttctattgcttgtttataccaatccctatcactagccttatatccatcaggcattttctcactaggatatatttcaaatttatcatctacacttgcaaaatatgtactaaagatatcgttatcactttccttgacatcttttaacatactagctatagcaaagtttgattcatctttatcagaattaacaaaattataattagttgataatgctttagtcatgcttacaaacccactaaaatagttatcaattccatcatttaattctaaaagagtttgttgacttgtaagtttcaatttttgattaaggatcgatttagcttgttcattggcaccaaatccaagaattatcaaaggaattaagcatattcctaataaactcataacaagcttggttctaatactttttagtttaattttctttaacttcattattatttcccctttatcgtaagtatattaaatatttataaatattgttgtacaaaattttattgtaaagtagaattcttgtatcataaaaacaaaaaagtctcatttcataaattttataaaacaagactttattataactttaattatattaatttttaccatcatttaatcatattgccattatatatgcagtgtcttttattgtcaatacttattatttttatcgaaaattgttagaatccgtactatttgaccatcgataaatgttttactgtaaattagcaaatattttttaatatatttcaattcacaatgcacatttcacaattacagctaaaattcttgtaatatttttagaattatcatgaatcattatttttgcaatatatattctaaaaaattaattcatcaaaagctatctcaatctataaaggaatgcaagttaactatctgtttcttcaaacgaacttactaaatacaaagtttttcgtcaatttattaatgctaaaaaatatataggtataatataaaattgcatcattaaatttcagaaataaatctgttacataaactctcagcaatttaatatactataattagtgtattttctgtcagcctattaaatttcgcattaagcattaattatatgctttcacataaatattaaataaggaggattatatatgtttacttatatcttaatattattaatttgcattttactatcaactataataagtagatttataccttccttatcagttcctattgtacaaattgcaattggatcattaattgcaataatacattcagaatttagtattgagctggatcctcatacatttctagtaatgtttattgctccccttcttttccgtgatgggaaaaatgcagataaaagatctctatggaaacagagaagaaatattcttttaatggcactagctttagttattgcaacagtaatattagttggattaattataaataagttaattccatctatttcattgccttcagcttttgcacttgcagctgctttatctccaactgattatgttgcagtcagcgtactttcaaaaaaaatctcacttccaaggaaagtacttcatcttatcgaaggcgaaggacttatgaatgacgcatcaggcctagtatcttttaaattcgcattagctgcagcactaactggaacattctcattattcgatgcaactataagtttttttatagtctctattggaggaatcattgcaggattagttttagagcatattctaattaagttcgagctttggataagaagtcttggaatggaagatattacagttgaaatactacttcaaattctaacaccctttataatatatcttgtatcagaggaagtatttaaagtctcaggtatattagctgtggttatagctggaatggtatattcactatcatctaagaagctaaagtttaaaaatgctagactaaatgctgtatcagaaaatacttggtcagttttggcctacgttctaaatggtcttatatttataatagttggattgcagctaccaaatataattaaaattgctttttatgaagctacaatcaataattttgaagctatcattgatgttttattaataacattatccttacttacacttagatatctatgggttttatttatgtataagtttggagataatgcctgcaaaacagaaaaaagaagtgttaaatttcacgttgcacttttaacttctctttcaggagtaagaggcgctgtcacattagctacagttctttcgattcctttggtattagaaaatggtgaaccctttcctgagagaacattaattttatttttgtccgttggggtaattctagctacacttcttattacaactttcatattaccactatttgccaacaaaaatatccctaaagagaccgattatttacagataatgaataacgcacagataaaagtttgggctaacactataaataaattaaaattagaaattgataataaaaagtacattaatatgattataagcgagtataaatatcgtattcatcaattaaaacgtggaaattcttattataagaactggaacaggagcagcaaagaggaaaagaaatggatgcttatatgttttaaaaaagaaattgaaaataccagaaagatgttacaagaaaataagatagatgaatcaactgcatatttttacgaaaaatcagttaggaataaaatcaaattaatgtcatcagttgaaggtttttcgttgattttcaaagaagctttaacgcgtatttcttctttaatttttaatatgaaaaaacttaggtatatattaagaggaattgaaaacaaaaaaagaagtgaacaacaattaaaagacttggccatgaaagaactttattctactaatgcaaaatacttaatacaatatgttaaatctatcattactcctgaaaatgaagaaacgctaaagaaaataattttatattatcaaggtgtctattgggttgcaagcaaaccaatcttaggaaaagctagcaagtatgaaaagaaaaaaattcaaattaaagcaatgcaactagaaagaaatactatacaatctttatttgaaaatggagatataacttggaatatagcatctgaactaagaaaaaatctaaattatattgaaagtgatgttttaagataataggcttttatttttataagcctattttttattttctagaaattcatatttaagttaaatctgtggctaagttatggcaagactaattgtgaaagtcactgttccacaatcgcataagatttttttatgttattttacatttagtgttgcgcttctaatcctaaaaagtagtttccatattgcaattattttactttagtgctaaaataatttccgaaaagaaactattttattaaccttaaggagatacttattttatgaataaacaattatataattctaaattggaagaaggattatcaaggcttcagtgtgaacttgttgctgagagaaataagataaatacagaaaatatttcttggtttcagtatgatttattagaatccctataccatacagatggaaatcgccctacagaattaagcaataatttgggtgtttctcgttcaaaaatatctaaagggttaaaagcccttaaagatatgggatatgtgaaacaagaaaaaagtgattctgatgcaagggaactttggacagtattaactgataaaggtttcaaatttctaaaagaaattaaaaaaggacatgagcatttagcagaaattgcagaatctgttctaacttcagatgaacagattctttttactgagctgtgcctaaaagttagtaatgcatttaaggaaaggcgtgattgatatgacaagagaaatgattgaaatccttaatgcaaatgagaacaatctaaaaaatatatctataaatattcctaaaaaagaaattacaatagttacaggtttatcaggttcaggaaagtcttctttaatttttgatacattagccgctgaatctcagagaatgttaaacgatacatattcctcttatattcaacaattacttccccactatgggagacctaatgttgaaaaaataaacaatcttcctgtctctatcattatagatcaaaagaaaataggcggaaatgcacgttcaactgttggcactgcaactgatatctatactttgcttcgtcttctcttttctagaataggaaaaccttttgttggttactcaatgaatttttctttcaacaatacaaacggtatgtgtccacattgtcaaggattaggagtaattaaggatattgatattcataaactaatagactttgataaaagcttaaatgatggcgctattaaatttccaacatttcagccaggtggatggcgattaagccgatatacagagtccggttattttgatatagaaaaaccgattaaagactactcagatttagaactcaataccctactgtatgaggaagaaaaaactcctgaaaaacctacaattaattggcataaaacagcaaaatatgctggacttattcctagaattagaagtgcatttttagaaaaagatcaaaagcaatataaaaaagaaattgaacaaattgttgatgagcaaatttgtcctcattgtaatggaaaacgccttaatgatgctgccctatcctgcaaaataaatagtaaatcaattggtgattgtgcagatatgtcaataagtgaattaaaatattttcttcaaattataagcgaaccaaaagttcagacagttattgatgatcttattaaacgtttgaatacattagaagaagttggtttagattatcttacattaaatcgtacaactaatactttatctggtggagaatctcagcgtatcaagatgtcaaaacatttgaacagcagtctatgtgatgttttatatatatttgatgaacctagtattggactacatcctcacgatataactggtataaataagatatttaaagggctaaaagaaaaaggaaatactgttataatcgttgaacatgatcctgatgtaataaaaatagcagaccatattattgatgtagggccaggctcaggagttaacgggggaaatataactttccaaggaacatatagagaactattaaatagtgatactgctactggtaaagcattatctaaaaagcataatatgactacatccaataaagaattttgtcatttctacgagcttaataatgcaaacatgtttaatttgaaaaatatctctattaaaataccaaaaaacgctttaaccattgtaactggagttgctggttcaggtaaaagtacgctaattactcgtcttttccgcaataagtatacaaacagtatacttttagatcaaaaaagaattcatacttcttcccgttcaataatagcaacatatatgggattctttgataaaattagaaacattttcagtaaagcaaacaataaatccccttcattatttagctttatcggtgaaggtgcctgtcctttatgtaaaggcaaaggcataataaagacagatttagccttcatggatgatgttgaggaaacttgcgaattatgtgaagggacacgatataaacaggaaatatcaaattataaatatagtggatacaccataagtgatattcttaacctctcaattgatgaagctttagaaatctttatcgacaaagatttaaaaaagatatttaacactatttctgaagcaaatctaggatatataaaactcgggcaatcgcttgatactatgtcaggcggggaacttcaaagattaaaaattgctgcaacccttttaaataacactggtgaaatttacatattggatgaaccaagtacaggattacatgagtcagacataaaaaaattgatacaggtatttaacaaattaattaataaagggaaaaccgttataatattagaacataatttaagtataatgtgccaggcagactggattattgacttagggcctttaggtggatttaatggaggagatcttgtatatatgggttaccctaatggcattacaagatatacttcttccgttactggtaaaagattattagaatatacatcttaaactatagatatccaaatttaaaactaaacttatgtgataacttaccgaaatcataaatattttgttccgaaaagctatgaaaatatcgctgaagtttctaagcggcaggttgtatccaatttagcatgctccaactttcagtttgacaagctaaatttgaacaacctacagctaagaacctttaacagctcattttcaaatgttttcttcacaaatatatttatgatttctagtgaagatatgaactcgaagttttagaaaaatgctctaaacattaaattttcaatgtttagagcatttgaacttattaattaatgtatcaaaagttatatggattttaaatttaaatttgcagaacctattatatagcatataccttaaaatttaaaaccatctttttatgtatcttatccttggaattcaccattagaaaactgcccttgattttttgttccatttgccaaagttaatgtgcctgtcccatcttctctaccatgtttaaactcgccttcatatttattaccattagcataaattaatgttcccatcccattcatttctccatctttacactcaccttcgtattttgcaccatttgcgtaattaaatgtacctcttccttctattttatcatttacaaatttccctttatagatgctaccagtagaataagtgagttccccattgccttccattttaccatttttaaattcacctacatatacatcaccatctgcatatgcatacatacctcttccttccattaatccattcttatatgagccttcatatctatcgccattaggactagaatatatgcctttaccttccatttcatcatttacaaactcacctgtatatttgccaccatttgaataagttaatgttccttttccttctcttttattatttttaaattcacccacatatacatcaccattttcataagtatatgtacctactccgtccttcttctcactctttatctgtccaacgtatttatccccattagaataatctatagtcttttctttattagaatcacatgaaataagtaaacctgaaccaagtacaagcaaaattccacttattataatgatagaatatttttttttactaaaaacattacttttcattttattactccttttttcaataagtctcaattttatttcccatattttttacattaatagtattataacatactattctgacatttttctattgaaattaaaatgcgagtttgagtcaatcgaaagttgacaaaagttttaatagaccagctcatttttatgcccttcatcctttgaactaatacaccacaaatataatttatgtattgaggagatgcttttgtatctccttgattatttacatagtattctttactatctttgcctactaaatttatactctaacaaaatgcaatattatatgaattaaatgataaaataaacccaacagaaaaacttttattctctgttgggtgtaattccataatttattttattcttttgtaaaatcacatataataatacgtatatttattattgtggcacaaaaaagactatttgttggaattcctaattccttagttagcatagaagtaaatttcttcatcattgatccaataataattgcatgatcatttttctaaccttccatgttcatacacccattttacttgtaggtaaaatggcgctacaccaactccacctgccacaaaggtgaaattctttttggaatatattatttattagcttccttttactaactatcttgtaaatgaataattcgccataatctactatattataactactgctttaattaagtcttttggcttgtccttcattaataatagtgcttcttctatgtgatcaaatccatgatatacatgtgtgactaatttacttaaatcaacacgattatatactaccatatctcttaacatttctgctcgtaaacgacctccagggcaaagacctcctcttatagtcttatgggccattccgcaaccccattctacacgaggtattggtaaagtatctccgcttccatgataattgatattagaaattattccacctggtttaaccatagatactgcttgtgccaatgtttcagcgcctccacctgccatgattacacgatcaacaccttttccattagtcaacttcataacttgatcaactatatcaccatttttgtaatttacaatatctgttgccccgtaaaatttagcagtttcaacacaaattggtctgcttcctactccaataattctacctgcaccacgtaatttagctcctgcaattcccattaacccaactgctccaataccaattactacaacgctagatcccatttgaatatctgcaagctctgctccatgaaaaccagtagtcatcatatcagttatcataacagcagtttctaaaggcatgtctttaggtaaagctgcaagattcatatctgcatcatttacatgaaaatactcaccaaaaacaccatctttgaaatttgaaaatttccaccctgcaagcataccatttgaatgttgctggaaaccagcttggacttctaaagatctccaatctggagttgtacaaggaactattactctatcaccaggtttaaagtccttaacttcacttcctacttcaacaacttcacctacagcttcatgtcctaaaatcatattatgtctatctccgagagctccttcaaaaactgtatgaatatctgatgtacatggagatacagctaatggacgtacaattgcatcatatgtacctgcaactggtttttccttttcaatccatcccaccttattaatacctagcattgcaaaacctttcataaatctgctcctccttaaaaataatattttattcttttataatcctaaatgcattgttaaaaaaatattttttagacctaatttagtttcacatatatacttaagcaaatataatgccaagatatattgcaaagaacatattacgatgctttaattaatcatatttagcaattcatcactgttttctctaataatatagctctctttttttcataacattaatattattattcatatttattcaaaatactgttgtaaatttctacacttttatctttaattactgttggattattaaacactgttgcattttaatacaatttttatgtaatcaacttgttaaaaaaactcatgaaaaaacttattttacttgtatattgtattttttcatttttgcatacattgtactcctatttattcctagtatcctacatgatttagatacgtttccttcacattgattaatacaaattgaaatcgctcttttttctaattcttctagtgagcacatatcatattccagtatttcattattacaataattcaaatctcttttcatcgttttattttcaaaactaaaggaagtatttccatccatatttacaatattttcaatgcaattttctaattctctaacatttcctggccaattataatttaagagtttttcatatatatttttctgtattttgggaataggctttcctaatttagcagcttttattttcaagaaatgatctataagaatttctatatctttggctctctcccttaaaggtggtacatatattggaattacacttagtctatagtataaatcatctctaaatgttccattttctatttccttttttaagtttttgtttgtagctgcaataattcttacatctacattaatatatttacttccaccaatcctagtaacaaatccttcttgcagaactcttaaaagatttacctgcatatctaatggcatttcacctatttcatctaaaaataaagttcctccatttgcaagttcaaattttcctggacatccacctcttttagcccccgtaaatgctccttcttcatacccaaaaagctcgctttctattaaacttttaggtatagctccacagtttattgccacaaaacttttatttcttcgattactattgttatgtattgattgagcaataagttctttccctgttccactttctccctgaataagtactgtagacgggctattagatatactctttatttgttctttcaatctctgaacctcttcactttgtccaataatatcgtcaaaggtatactttgctgttctgctaatatatttattaaccagattatagacgttttgaatatctttaaatattcctaccatcccagtaatattagaatttttatctttaatggggtatacatttatattgaaccttttctttttatcagaatatacaatttcttcatcctcatatgattgtccattcctgagttgttcaagtatgtatttccagttatctaaaactgtgtctacattcctatttataacctcttcctccttcatgtgtaacataccgcatgcgctcttatttatggcttttattattccttttgtatctaccgcgaaaattcctagatttactgaattcataattttatttaaatattgatatgttttaactaattccttttgtgtgtttttaactttcaaatgattctcaatagattttactgctgccactacaagacctaatgtatgtgggtgagccaattgacggcgtccagttaaattaaggcacccaattatatttccatcctcgtcatgaacaaccgacgaggaacaagtccatacctgaaaaacttttataaaatgctcttctccagaaacttgaagagaaatattttcagcaattgcagtgccaattccattagtgccagcacttttttcgctcatatcagctccctcaataatgcccatgtgaatttgatctctaattatatcttggtcaccaataatagttaaaactactccatttttatctgtaaaatataatgaaaaacctgaccctttcaaaaaattatatagtatttccataaatggtctggctatttctattaatgacttgtttttttgtataagcagattaaattcttctcccctaagaattttagatggacacggtatatccttttttataccataatcattacatcttttatgtgactcctttattatttcattataagtatatcttctgatcatttaatattcccccatacagttttattatataaaaattataaaaacctaatctattatattgtttcaaaaattatattttcacgtcaaatacaagcttttatttgtttatttatcgtatcataagatatagaaatcagtagtcagataattagttactactatatattatattatgtatctattgatataaaacaaataaggagaataaagatttctctctactctcctcatactggaattcttaaacaaatattcaacccatattaccaattgatataatcaaattatagcatattttaacaaaagcatagcctattttttacattaaatttttatttatctataatagtgcagtttttcttgaataattttacagttgaataaaaaaacagattcttaagctatttttaatgactcaaaaattttttctatcggcgtaccgcttgcggcagctttgtaaatatatattactttggacttttctaaatttttcttagcaactttatatccagtattaaattgaagagaatcagtacagtatattttgcaataagtataatttactaacattatgattagatatctattaatgctttttccacttcttacttgatatccatctagtcctaagtacgttttgcaatctctaaaaaatggttcgattgcccatcggtcggtatattgagttaaaatatctaatggtgctaatgatttctctaaggaaataaaagttttcaatgctccatctttttggaaagcatctttaggataacttaaaacaatagagacattctttctatcttttaagttgccaacataattgtaaatgtagtattgcttatctttgacggtgacgaggtcaaagtcttcaatctttaataatgtagcaaacttatgaagttttattcctagtctttcatggccatacggaaaaatgaccctattagtttttaaagcaccaatatagctatagccggctttttcagaagcattaaaaatatcattacaactataccaactatctgctaacacatagcctttattttcaggctttggaagtgttgtaattaatttttgagttaattctattttactcatatattctttatcatagatatcaattgagtatggcagcactaatccgtcacacgatagtaaagaaactactatttgatgaccatatacattcttaccttttaaatgagaattatgaaacgaacacttttcaattggatttttagcctttgacgagggctttgtcttttcagaaatagtgtcatcaataataaagtatattggctgtttggattctcttgatttagcccaaatgagttctatgatatatgcttttaatgctctttctaaaagtttttcattccaattactatttgaaaaaaatctagtaatactagttcgatgtttcgaaggagcaagctccgctatgtcggaaactttaccgttataaccttttgatatcatagcattcattatattttctaaatgtcttaattgaggcttagttaagtaaaaatcaaaatttagttgttttaaaaaattgtatattgatagctcatctgatataattgtgttctgaaacatttatgtatagctccttgctgtcattgttgtgtggtaactcaattataacaaggatttatcatagatgtttttttattttattcagttgtaaaattattcaagcatttttgcactattatagttatttatctatatttatcctgttgctacaagtaatcaatatttctaaaaaataaagaattcaagattacaatatcattcaaatagttactttcactctaaatataaatctcttttaaatctatctcaaatatattctgaattcaatcaaaattttatctatccattatatgatgaaaatagttaatatcattttcaaatatacattacataaaaagattgaaactaaattttacaaaaaagtatatagtttttagcataatataacatattttttaattatttcttgatcgaaaattttattattggtataataaggcattatcaagaaaaatagcacgtcaattcgtctgtatatttgtgcttgctattttctatcatattaataaagctaatttttttaatcaaataactttaaatttactcaatatatatctaaaaagtcatattatgaatatatataaaaacataatttaaaattgagactatatgcattgaggatttttaacattatggaggtaataaaatgacatatgtagctattcttttggttgtattaaaatctcacccagtgctgagtatttggggatgtattctttttggtatcattagtcaatttgctttccccaaaaaagctagattccatttagcaaaattttctataatcttttttgtgattattattgctaatatttttgtaggacattttttaactaatattattattgacaattttggtgaaaaaggagaagctatgatcttagataattcaccaacatcagaccaatataataatgaaagagtttatcgttataatgttatgattaaacctgacaatgatagcaatgctatttcaacttactttttatcatcagattttaatattgttcataatgattcacttaatagatactactatccctcaactggagtcaaattcaatgtaaagtatataaaagcttatccaaaagcttttgttattatagcaaatgatgatagtgaatatggcagacaacttcagattaataaatattcatcagagaaatctaagatagaaaatcaattaaaaatggatcctgaaaaccctgatcttaaagaaaagcttaaggaattggacaataaaattcaatctattattgatagcaatagtagtaatactagtgaaaatgcaaaaaaacttcagcttaacaattatttatcggaaaaatctaatatagaagaccaattaaaacttgatcctgaaaactctacactcaaaaaaaagcttgaagagttaaacataaaaattctttctattaataacagtaattttaccggagaattagtagctatattcggtggtaaaggtacagattctggaaaactgaatgacgcaagatatattacagtagattctgataataatgtttggatagcagattatactgatgggcggattcagcagtttaataactccggtgaattcattaagatgattcaaataaatggagataaaaatgactctaaactaattaaaggactagctgcagatatgaacggaaatttatacgtctcttctggcagcacgattcaaaaatacaaaacagctgatggtagtttatcagcaacttttaagggaaatgattattatggtcctttagcagctgataaggataataatatatatttgctaacttcttcagcaacagaaaacacattatttaagctaaactctgatggagcagtactttctcggtttaataatattataaaaaaagctaataaagatgatccaggtatgaatgctgatttggcattagatagttctggtaatatctatatctttagtgaatatagcaaaaagatacatgtatataattctaatggagatttcattaaatatttagatttaaagcttaataatcaagatacaaacatcgagacaatttctatagataatggcgataatttatatgtaaaaagttttaatggaaattataaatttgaccttaatggcaatttacttaatgttttacctgataaaaattactatagcactgatgtggattcaaacggcaatatttatatgtctgataatgatgatatatttgaatataatctaaataatcctacacaggaataaaggattgactgtccaaaatgatctttatgtaatttttaattaattttaatgaatatttctcaatgttctgcagataatataattgttcagactcaaacacaaaaagagatagcaattcccccattctccctgctatctcttttctatatgttaaattctatttttatcttaattctttaaacaatttaaatttatattttcttgcaatgattctaattggataataataaattctaacgtacctacttgaccagtatagcgtgaaataaactttatctttcactttataaacttacatttccattcatatcttctgtcccttgtgattccttagaatgaatcttttttctaaactttcttttcaaatcatcaaaaactgtatatatgattggtactacaaataatgttaaaattgtagaagtaaccaatctaccaattacagcttctgccattggtgacgcatttcagaacccatacccttagatacagcaagagtaattttttatccttctgccactaccacatctgtttcttcttgtttgccttgttttaataaaagtgttggaattattacaatagcagttatgattgaaattataaacattgtctcattaagtgcttgaagctgtgcctgacttgcaacttcgccaaaaatcttacttaaagcaattcctttagcatcactgcttgaaatcccgcccttaataagtgcaccttgaagcatctcaaatagcttcatgctatttttattaaaagatgtcacttgcgaagctaagttagaataatcaaccacatttctatgctgcatgatgcttgtaataattgtgacacctatggaagttcctacttgctttactgtatttgtcaaagcagatgcatttgacattgctgcctttggtaatccgctaaaacctactgtttgaactggcgccataagaaatcctacgccaaaacctctaatcattaataagactgtaatctctatattggcagtatccaacgtaatttttgacatactatagctgttaatacctatcaaaatcaatgcaaatacagcaaataatctaacgtcaaatttattaccaatttttccatataagatcatagatatggctgtcgctattgcttctggaaataaaatcatgcctgtattcattgaatcaagaccctttatttgttgaagaaatattggcattagaaacacaccaccataaagtgctaacattgcaacattcattataatattactcatacagaatgtataattctttaaaagttttaaatcaagcaatggttcttcaatgagtaattcattcacaacaaatattaaaaggctgtaacatccaacaatcataagaatgatattttttatgtcgttccagtccaaatcacttttcccaagtacatagagaacacatgacattccgatacttgaagttaaaaatccaataatatcgaatttctttgaggacttatgttctgatttcttaaatataagtatagccattattgtagccactattccaactggaagatttataaaaaagagaaatctccaattgaaattttgaatgatatatccacctaaacttggacctaaggcaggtgccgccattacgcacattcccattacccctattgccattcctagctcacttttatcaaaggtagtcattaatattgtcataccaagtgatattatacaagctcctccaattccttgaattactcttgcaattatcattatagtttcattccatgaaataccacacattaacgaacctaaagtaaataaaatcaacgcagtaacaaatacgcttttagtgccaaatctatcgccaaaataacttgttgatggaattgtaactcccaaagtcagagtatatgcactaacaacccattgtatttgatctattgatgcgttaaatgtctgcatcattttagtaatagagatattaataatgcttgtatcaaggtttgccataaaaatcgccatgattacaacactcataataagccatttagatgaagattcttttttattttccatacttccacctactttatatgtatttttatatctgcatttgtaccaggtagaagattagcatcatttttctcaaattcaatttttacaggtaccttttgaacaaccttagtaaaagttccaccagatgaggatggtagaagtgaaaatgctgaatttgaagcttttcctatatactcaactttacctttaaataattttccttcaaattgatcaatttttatatctacactttgtccttcatgtaatttttcaaccttgatttcttctatattagcagttatataaagcttttctggatcagtcattacagcaagtgtcgatccagccgaaacatattgtccctcctcagcttcctttttaataattatcccattagttggtgctctaagtaaggctgaatcaatattagcatctgctaaaccattagcatctacacgacctaaaatttgatcttttacatctttgtccccctcttttacattaaattcaagaagtttacctgatacttgcggagttatgctgataaaatctccatcaacctttgcatcttctgttgaaacaaagttttcattgttataccagtaataaaaccctactccaccaagagtaattaacattgcacataatattaataaaattattgttttacgtttttctttcatcactgtcatcctttcttagccttttataccgacttcagcaaacatacctggtttcaattgcccctttgaatctgttaaaagaattttaactaaaacattggagttttgagagtttaatgttgaatttattactgatatggttccttcaaattctgaatcttctatttctgatactttaactgctacagcttgtccttctttcaaatcttttacaatccttagaggtgcatatgcattcacacacaaagcatctggattagatattgaaataagtgtgctgccaggtgctgccatttcgcctttacttatattcttaacagtaacattacctgaaataggtgctgtaatggttccattacttaatgccacctgcgctgttttcactgcttcttcagcttgatgtacttgagccttgtaaacatctatacttgtttctgtagcaccatttttaagcatttctaattgttcttctgcagacttttgtcctgactcagctgaggtaagttgctgctgtgcagtttcaagctgcacctctgtagctgctccagcatcaactaaagcttttgtacgatcataattctttttagcaacatcataggttgctttagcgctatccaaagttgcttgcgcttgtgatatttgttcaggccgagtactattcatagcattatttaaatttgcatttgcagtatttactgctgcctgtgcttgatctacctgtgcctgaagatcctgagtatctaatttaatcacagcatcaccttgatttacagttgatcctacattaactaatacatctgaaactctagcagaaatttttgaagatacattaacttgattatcagtctcaatctttccagccataagatatatggaatttggcttattaacctcttctacttgaacagcattttcattcctattattttttgcagcgcatcccgtaaaaagagaggttcctataagcgttggtaatataattagcaatacatatttcttcataaattaattactcctttaacaaactaattcattttatgccttcatttgaaattacatctcgtatatcttcagttcttataatttcaaagattggatctaaaacctttaatagtactattaaatcttttcttaatgaaccataatcagctatttctaattctattgatggtgcttgccggcttatagcagcaagtataagaaaacacttttgtggccatcgcagataaatcaccactccaataatccaattaataatctggaatttacaaaacctaaaggctacgaatgttatacttcctataaggtactcaggtaccttataggaagtataacattggaaattataaaatgcaatactaaatatttgcattaataaatcataaatatctctgaagcctaagaatccttaatagatgcaagttccaccattttttctttttaatgtgcatattctcaagaatatatattttttagaatattaccatattggttctagtattctgaccctataccaagaacaataaaaaaatacctatagaccaaacactttcttcatgtgtcttgttcataggtatagttttaaattatctttttgattttgttgaaatttcgacatttagctttcttccagcaaatttctttccagtgcaatgcttcattatggattccgctgcagcctctgttacatttacaaatgaaaacttttctagaatatcaatatctccgacatcttctctttttacatttgcagtctcattaaagaaatccactagcttccttggattaatcttatccaagcgtcctacagtcaaaaataacctcttgtaatctgtctttgagcctatttcattttcagtatagtcataattcacttctttgctatataccatatccatcaatgccgctgctacttctacgaggttaaactcttcatcaagttctgttgccataggtataaatttcttatagctatcctgctccaaagtttcctttatctttgaaaacatatttttgtactttgaaacaaatatttcatcgacagtaggaatttctcttcttcttatcttgctttttgtcaccttttcaatatgcttaagagacatatattcccttgcagttaccaatgtgtaagcaacaccttttctatttgctctacctgttctgcctattctgtgaacataagattctacgtcctgaggcaaatcgtaatttattacgtgagttacattttcaacatctatgcctcttgcagcaacatcagttgctatcaggaattctaaatttccttctttaaattttcttaaggtatttattctctgattttgattcatatctccatgcattccttcagcagtataccctcttccttgaagaccttctacaagttcatcaacgttccttttggtcttacagaagattattgcagatgtaggttcatcaacatccagtatcctacatagtgtttcgaatctatccttgtttttaatttcataatagtattgatctactgtagctacagtcattgcattttttaaaatggctatgtgtttcgtttcggatttcatatatcttttagcaagtcttttgatttcttcaggcatagtagctgaaaacagcattgtttgtctgtcttgatttgaattttttattatttcctctatatcgtcaataaatcccatgtttaacatttcatcggcttcgtccaatacaagaaatctaatagagctcaagtctaaaacttttcttcttattaaatccagcactctccccggagttcctactactatatctatgcctctacgtaaagctgaaatctgcctgtcaataggttgcccaccatatacaggaagcaacttaatcttagtaaatttagctatacgattcaattcatcatttacctgtatcgcaagttctcttgtaggcgttagtattatactatttaccttaccatcttgctttccaattctgcttaatattggtgcaccaaatgccagtgtctttcctgttcctgtttgtgcctgcccaataacatcatgaccttctaaaagaactggtattacctcagcttgaatcttagaaggttcttcaaatcccattgcatcaatagccttaagaatactctcatcaagacccaattcgctaaataccttattttccaaattaaccccttctttcttttttatagaatttataaatttatctgatctctagacagtgtaacactcccacctctttttaggttgtagataacagtaacatgccctaagattagttcaactaagattcagatggagattcctatcccccaccttaatcaaattttactttatttcaataaaaagccaccttaaacaaggtggcaaaaatcacctaatgtgttgttaataaacatcaagaaaatattttatactttttgaatattggctgcttgaggaccttttgtacctttttcaacatcaaactgaactttatctccttcttgtatactaaatcctgaaagagaagatgaatgtacaaaaacatctttttctccctctacctctataaaaccaaatcctttttctgaattaaaaaactttactgtacctgttttcataaatgtcctccttgtaaaaatattgtattttgatttgtcaagcatatcatcacttgtagaagcaagttatgatttataatttactagacttttcccattattaagtattcccaacatttcataaaacaatacttttataagaaaaaagtaaaatatacatccttattaatttttattttcctagcaattaaatatgattatttctgcttcatcattgatttttgcatataaaattttgaaaatttacaaaaaaggcatgccaagtatttctaaacgacctacctttatttgtgttttttagtaatattatggatataattatagtaatatattattagaaaagaatctatattaattaggattttatttccataaatattaagtttacagattaaatgtatatcatcactttttctaactcaaagcataatccactaattcataaaaatcagtttctacatctagcattaaaatagtctatattataaaaataaattctataatatagactattttcaatgtagttacttatcattaatctacgactaggaaacatctactatataattgtaatttgattgttggtatacaaaatgagaactttagcaaatagaaatatctatttttcagcttcagattttaataaagaatatagattcaaatctacaacaccttgtcccttccaagtatatccctgcctaattgtaccctctttaacaaaactatttctttccaatacattctgagatttaatattttctggcatgacaaatgcttgtattctattgattccaatgtcattaaataaatagtctaccattacccttacagctttagtcgcaattcccttaccccaaaacttattgttcaacctgtagcctatagttatcatatttacctcgttagaatagtcaaatatctctgctattccaacaaccttctcaggttcattatttagacatatgccaagaaatatgcattttttcttgtgaaaatctctttcaaaatgtcctatcatattagcaacagtatttttactctttttaatcatcacaggagaatatttaaaaagttcttcattgctatatatttcgaaaatttcatcaagatcagtatcaacaatttttctcagtgttatttcatcatctgaaatatgtggaaattgttcatatggatttttattcaaattattcctctccttccatcccctcgtcagcttgcctaaaatatataatatctttctcaattagctatataagcttagcaagtagcattctattaaatttttcaagctcattcttataagattttatattttcatttacaataacaattctaattttcgtatccataagatttcctaattagatcgaaatgttcttgcatagcattgtaagctagtgattcatcccttttctttaaatttcttaataaattctcatgtatccataataagctttcttttgtatttccctcatgaaaaatttgcattctagcttttcgaatgaattcgtctacaagttgagatataacattaagtacattaattaataatacatttcttgaagcttttgcaattaattgatggaacttaatatctaactcaacactttcttcttcactactagcaatatacatcttatctaataattctgctaaaagttcaagctcgctatcttctatatttttagctgctaatttagaacattgaagttctagcgtttctcttaaatcatacatttctttgggcgaactctcctgtaacataaacattattgaaagaggttcaagcaaagagttattaaaatttgttcgtatataatttccggctccatgtctgctttctattaatcctatgacttctaaagccctcatcgcttccctcacagatgcacgcgatacctcaagagattccgccatctctctctccgtcggcaatttatctcccttttttatttctccatattttattttatccttaattttctctataacttgatcatatacttttggatttttattaggtacaagcatatattgtgcctccctccttttcttattgatatttcttaatacattatacatcaattttgtaaattctaatattgtgaagaatatgtattcttctatggtaatattcttcacaatatttattccttgccatatagagtatatgttatttaaacatatatccaaagctcttatttaaaaacatgaactatcctaaaagcattttgagtagttcaatagattgaatattctattgttaaactagtcatcaaatatcaacttgtatttaaattcactatgctaaatatacatgctagccatatatcgttaataggaggtgataacataatggatactaatgaattaaatactataatatcagcaaaacttggaatagctctagatgtatatcctagcgatgattctaataaagtggcttaagtaaaggctataaacattgaaaattcaatgcttatagcctttagatttgtttgtaatttaatttctcatttttaaaatttataaatttaaatactattgtaccatatgttgcagctaaaattgatgcaatcataatacacatttttgcttcagataatatatttgtatctgcaaatgacaaggatgacacaaatattgacatagtaaatccaatgccaccgaaaacacttgcaccatataaatgccttttggttacattagatggaaacttagctattttcaattttattaaaataaatgaagttccaaatataccaatttgctttcctacaaaaagaccaaatataattcctaatgaagctggtgaaaacaaactgcctgaaaaattatcagtattaattattatacctgcatttgcaaacgcaaatattggcataatcacaaagctagaccatggtgttaaagtatgttcaagtttatacaatattgaagttttaaatttatgaatattttctccaattggcaatgacatgcctagtaagactcctgcaattgttgcatgtataccggattttaaaagacaaatccatagaattatacctaaaataatgtaaatagatgtatatttaattttaaatttattagccaagataagcgtaacaaagactattaatcctaataaaagcgctatccatgaaatttgactattataaaatattgctattactacaatagcacccaaatcatcaactattgctagtgcagttagaaatacaacgattccttttggagcattttttgcaactaaagaaagcattccaagtgcaaacgcaatatctgttgccatgggtatcccccatcctgtaatggttggcgccttatagttaaataacgcataaataattgcaggaacaatcattcctcctatagctgcagatattggaagtattgtctttttaaaagattttagctccccaaacacaacctctctctttatttccataccaacaactaagaaaaatagagccatcaatccatcattaatccaatgaagaaatgacattgataaagaaaatacaccatatccaatcgttatacttgtgtgcaatacatgctcataactccccgaaaaactcgaattcgcaattataactgctgcaatagcgcaaattaaaagaattataccactagaagactcactttttaaaaagtataagaatggacttagtattttagtttttattttaactttcattattaccctcctttttaatgcgatgctatagaatattacttaaaatgttttggctttattaaaaatctccataaaaaaagagacggtaaaactcaaaaaagagcttcccaccccagaaactaattgcttgaaaacaaattatataatttgcccaaccgtatctaaccacattaattcattttatattacacattatattatacattaatgcaataatcaagatttgtgtaatatgcttaattactatttgctatattttttaaacaaatcatctagagcttctctaagaagaaatgcctcggttctatcagttgcttttgacaaccttgataatctatcaagttgagtcttagtaaaataattagattttagcaccatactctctgcctcagaaagacatattctattcttacctaattcttttgccctaaataatgcactatcagctactctaaaaagttcaactacatttttagcatctcttggataactcgctacaccgaaacttaaagtaaaataaacattatcctcagaattttcatttaagttaaatgtattatctgataaataccttcttatttcttcaagctccataaagcttctttccgctcccttttttacaagtagtatattaaattcatcacctgatctaaataccatatctgttgaagataaattgttattcaaaattgaaataagcttttttattacctcatctccaatagagttaccatataaattatttaaactcttaaaatcatcaatatctgcaacaactatactaaaaggaccttcattattagatattaattcctccattttaattattaattcctcttttgatgtaagcttgttatccataaataacctccatatataattaagtacttcttataaatcactctattttcttataaatatactatgacttaattatactaacaccaacatatatatgcgtcaatatatactaaaaattaatatcctttttactatgccatatattcaaaaatcctatgaatattataggttatttattataatttctaaaatattaaattcatatgtatgttaagtaaaagcccatatttaattcaatatatacttacaccataatatatatgcatctatatatattgacatatatatgttaaaatgatatgcttatatacagataatgacaaaaaaaataataattataacgctgaatctttttgagcgggagaaccatttttttggggtgaatcttattttaggataagtagggttatttttcttcaatccgaatccgtcagctaatctcgtaagcgttgaagagaagttttttgtatactgctaatatactttttttagtatacccataaatattattgcttaataagctatagagacttctctatagcttattatttttttaactagtaatttaaaaaaggaggctttttatgttaaaagtatgtttaattggacttggaaaaacaggaagagaaatcgcaaaaatgatattcaaccaaaggaatatgaaaattgtagctgccatgtgcagccctggtagcttgaaaaagcatattgatctaggtgaagtaattggaattcaagaaattggtataaaaatcgaaggaactaataaactagaggaaacgcttatactttgcaggccagatgttgtagtcgatttttctactcctgaagctactttaaagaactctagaataatatcgcaaatgggaattaatatgataataggtactacaggattttcagaagtagatttagatagaataagaaatctagcctatagaaatcatactggcatagtgtatgctcccaacataactcttggagtaaatgtgatgatgatattaaccaaattagcttccatcctattgaataattatgattttcaaatatctgagatacatcatagagaaaaaaaggacattccatctggtactgctttaaagatagctaatgaaataaaggatggtttagtttacctaggcaaagatatttctgaagaaaatattccaattaattcagttagagctggtggtgttgttggaaaacatgaagttatgattgttggagaaaatgacagaattacaatttctcatgaatccttttcgagaaaagtttttgcaagtggagcaatccatgcaataaattttatacaagataagattggattctatgaaatgagtgatgttttaagcttatcaaagataataaaggatttatatgctcatgaaaataattttgatgcttataataatcttgagaatctaatagcagcagatatccaataatcaattagaatttacaaataaatatgttaacgtttgagaggagtgcttaattttgaaaagaaattataaggatatagcattatggaaagatgttactgaagaacaatggaatagctggaaatggcaaatttctaatagaatcactactcttgataaactggagcaagtagttactttaactgatgacgaaaaaaacggagtttatgcgagcttaaagaaactaaaaatggcaataacaccttatcatgcaacattaattgatccaaacgattacaattgcccgataagaagacaagccattccaactattgatgaaacaaatatatcagaatacgatagcaatgatcctttacatgaaacaaaagactcccctgtccccggatttacacgtagatatccagatagagttcttgttttgattactgaacagtgctctatgaaagaatttgtctaacgtcaaaaagtaacgttagaatgaaaaggagagaacaattttatgagagcagatagatgcgacttaaataatgattattatactaagatagatcgtactaaagcctttgttgatttaacaaataaacgtttaaaaatacttgatttaaatgctatttcgcttcaaagtcttaaaagaataattcattttgcatcaaaacttcacctaggaaaaattatatgcaattctaataaagagtctttagaatcttttgtaggtgctggctttgctatagaaggtagaattaatggatattttaaaggtgaagatgcattttgtatgtcttattatattaatagtgatagaaatatatgcagtaattttactcaaaaagacttactcgtaaagcaatgtctaagtttgcaaaacagctatgtatacaatgaaaataatcaggtgtatcaaataagaactgctactgaaaatgatattcctgaaatgatcaagctattttctacagtatttttaacttaccctacccctatatataatcaagagtatttaaaagaggctatgaataataaaattttatataaagttgccgtttatgatgaaaaaatagttagcatagcttcagcagatatggatatggaaaatttaaatgctgaaataacagactgcgctacttcccctgtatatagaggtaaagggattcttgcaaatataatctattctttagaatgtgatcttaaagctaaaggtttccttactttatatagtttatgtagagctataaaccctagtataaactttgtattaagtaagcataattataactttacaggaagaatggtaaacaactgcaatatatgtggcacttttgaagatatgaatatttgggtaaagaatattaattaataattggagcttaagcttaaattataatatatttaataagaactaattgactgctttttcaggttcagagaaaaggcagtctttttatatttacaaactagtgcaaatttgttatgaattattcacctttaataaaattaaaaatcacattaactattaacatgttctcatacatatgataacatatatatgtttgtataattatatagcaaataattttcatgtaagtgaattggaggaatagaaatggaaagatgatagagcacctattggcgataaactaaataaagatatattggaatttgctgtatgtataggatctaagttagattgtaaacaaattaaagatgtaaactggccctctcgctgtctccttgtagcagttagacgtggaaaaactgaaataactcctaagggagatactgttattttgcctggagactattttactgtcttaattaatgaagatagagttcctaaaataaatgatactctattattaatgttctgaaagttttgatattctaaaatagatatcttttaatgatatttaatctagataatatgctgatgtaaatatagacatgaaggatgatttcattaatccattaagttttctttttttagtttttccttattggctctaacaacagccgcctaataaattagtcatattattaaaattagggttctcttttattcccttcaaactccttactacttacctcttgaaaaatattactttttccacttgttttatcctgattcatcatattaaattcaattacttttttcatttcagatattagaattctaaagtcttcttttgtcaaaggcttcttatcatcctttagttcataacctatttgaccactgacttcaattgttgcatatttaacatcatctattgatgatattcctgcttgccttaggcgtgtctcaagcctatcaatagttaatcttaattttctcatgttggcaatattaggtttaccattttcaattacaataactgcttttcctgaaaataaagtttctaaaaaatccactttaatctctaaatgctccataagtaccataagacatgatagcaaaagcgctgctagaaaagtaataaacaaaccattaccagttataggctgaactaaaagagagcctaaccctatcattacaacagtttgagagattgtcatttgggaaatagattttcttccacctaaccttaaaataaaagttccgacaaaaaaaacaagtattgattgccaaatccagttgaattccattcttttcaactccttaaaaaatgtaatttattatggtagtattatcaaaaagaaattagtaactaattactaactaattatttgtctatatggtattcgaatcgctacacctgtgctatcaaattcatatgtcatatcatcaagaggcgcatttcctgcaaccaagtttattcccattttataagttgcttctgccatagcttgagcatcttgaagtacagatccagtcataataccctgattaatcaattccagggcttctggaataccatcaaccccaactactggtattattttagcgctgtctcctttattatatccatatttctgtagcgcttctattgcccctatagccatttcatcattattggaaataatcgcctctatattttttccatatttaagataaagtgcctctatcatacttctagctgtatttctattccaacctgctactcgtaaagcaagttcttgcgttttaattccatcactgtttatagttaaaataacatattttgttctttctaaagcttctatattatctcgttcacccattaacataacatactccattatgttatttccgttattatccatatttttgttagacttccacatattaattaaaatttgaccttgtaatataccagcttgtgaggcatcagttccaacaaagaatgctttattgtaggatttaacgtcttccatattgagaggttctctattaaataagatcaccggaatacctttttctttaattctattaattacttctcttgatttttttatatctactatgtctaataatataagatcggttttattggcttgtaatactgaatttatatatttattttgaattgattgatcattcattccatcgtaaaatgtaaattcaatctttccttggttatttccctgaatattttcaaagttttgcctaactagtgaaatatatttatcattagaatcatataagaatacatctatttttgtaggaatttgattagatgatggatttacttgagctctaatatttttacaataataacctgatacaataaaaagcataataattgatactaccaatactgaaatgtttttccttaatcgtgtcataaaaaatcatctcttccattgtttatatatacttattattatcatttaattgcaataatatttatcctgatttgctaatttagctttatcctaaagtataattctaaaaatttgagatgtttaaatataatttagatgactaccatttatttgttccaacgcctttaggatgtgtacacaattcagaccctacatcatatataaacggcatatgttaataatcttttattaaataatcaacttaaacttctataactttaagtaatgtattagcctatctgttatttccttttcaccaacttttatagcagataatttctctctaaattaaatttgtaacttcatcttttattattatatattctaaatgtaatgctctagttagtgaaacatataataacctttcatctaaaatattttctttatagttgtcttcacttggattcaatattattgtgcaatcaaactccaatccttttgttaaatatgatggaattattattagatcttctgctatttctttttccttacctaatattaattcaaaattaaatttgctctttccttttagaagtttgtatatttcttcaccttgtaacatattttttgtaattattgctattgttctttttccgtaattctgcacttcgctaatgattttctctatagctgaagtatattcatctccgctcgaaatttttactattctgggcttttcaccatgtcttaaaactggtttagcatccttaagtcctaaattttgagattgtagcgttttctttgcaaaatcaattatttcaactgttgatctatagctttgcgtcaattgaatgtaggttgcatttccttcaaagacttgctctgttatgtcttcccacgtctttaaacctttataataataaattccttgagctagatcccctactaaggttaacgcattacctttagcaaaactattaactaaatatacttggaatgggctataatcctgagcttcatccactataatatatttaaatttttcttcctcataaattccttcaagtaaaattcttatatatgcaagagctggcaagtcatcttcatcgattatattcttttcaaaattactattaaattcttccttcatataatctgccaataccttaggaattttacctccagttgctacttcaaataactcatcattataaaaattataatagatatctctagaatttatatccttccaatctttaaagtaattattaaattcctttttactgttagcttttacattttcctttattttgtctctatcttcatatagacttataagcaattttcttctttccggcgaatcttcattttctcttcttatttctcttattttcttttcccattcattatctatttctattaataaactttctattctttcttttatttttaaatttaaatatctttttatctccttttttcttttgttaataggataagcttttaaatcttttatatataacctcattatttcttttttatgaaataatatctcatttccaactttaatatcttcaatatgaattgcatctttttccattaatgctatatatctatcaagcattgttttgaatagcatggttcccttaactttgcttgaatttacaataagcttttttagagtttcatcattttcttctattatccttaataatttttcatccttattataaacttttccttttagttttaactttgataataccatttcctcaaaggtactttgatttacttcttccgctccaaggctaggtaaaatatctgaaatgtaacttagaaatagtttattaggagctaaaactaaaatttcatctccactcatgctttctttatatctataaatgagataagctaacctgtgtaacgctattgttgtcttacctgaacctgctgacccctgtactattataggcagatttttaggccatcttattatttcattttgttctttctgaattgttgcaacaacttcttttagctttttcccactgctttcttcaagatttatctttaaaaactcatcgactagattttgcccttcttcttcatttataatgatgttatttattccttcatcaaataccttttctatatcactattcttatataaaaattttctttttaattctagctttccttcaactattccttgtggtgctttgtaatacgcatctccaccagttccgctataataaagatctgcaactggtgctctccaatcaacaacaatttcttctccatctttgctattacttataccttttttcccaatgtatatactttcagtaaaccccatgttttctctaaagtctactctaccaaaataaggctccattagcgactcttcatatttctcaatatcttgagataaataactaaatattctttcattagcttgcttttcttcactaaagctttttacttgtttatttaaagtcttaattttttccccaacttcttcaaatttttgtttcttttcctttaattcttgttttattatatctttcttctgcagtaatacgtctctttcttcgttcaaaattgtatccatattcacacactatataatgacaggtagcaaaattcattatacttttccttccattaagataaattactataattaggtattataccataatatctcgaattaataatttaaattttctaataaatttacacgtctagattaatgtagtttatttcactaaatacattcagaaccaaacacttagcagttggttttttgaacacaaaaacataaattttaaaacccaagtaatttcttattagaatcacttgagtttttaacgttttgtagatatataatattatttttttcattgatttagagtcattttactcttatctaaaagtttagatataccagatgtttcccaatcttctatcttactagttgcttcattaaaagtcattccctgtcccacaagtatacctatcataatatatttttgaaataaatgttccaagctaactccaccagtcgcttcttctaatgcttcattaactaatggtgtaatatacccaatccaatcatcaggactaaaattatatgtgtctaccaatgataccctggctttatctgaagtattttcacgttctaaatgcttccattcaaaaccagattctaaattgcttaaatcataaactattctatcaacttccacataagctgatttctcattattttcatcatattgtgatgatttatctaatatgaattgttctttcttcctaaaatgattctcttctataagttcttctatagtttttaaatcaaaataaataggcataaatacctcttaaatatttttatctataagcagtttattaatatataaatgataatgtgaaatttatctgctaatatataacttttatcattatacaaaatataggtagttagtacttatatctaaaacactccaaagtttaattctataactttcctttatttaaaaaacattttatttgccttctcctaaaaagtcttataaagaaatatgcaataatagcaaagcctattaattcagctaaataataagttggatctgtaataagtctaacaatatcattatttacccaattgccttctggtcttacaggaaacttccatcccaagtatggccaaaacaatatattagtatataaccacatgctatctaatactaaatgaattgaactggcgatacccaataataaaatttaaccaaataacttttcattaaattttatcattaagactcttatatagtcaattttaccctataaaatatagctataaattattaaaagtacaaaaaattcagcctgaaaaaagctaaactttcttatacttttaataatgttttttaattattgaacattatacatgcctttactctccatatacttaaatatagattctccatgtttttgttcttctttttgtatatgatttaatacatctcgtacttcagtatccttgaattcaaaaattgcagtatcatatgctcctgacacatatttttctgtcattaataaatctgagcatatttccttatctgacaaattacttgtagcattttgagatttatttgcattttgatcaacaccttggtttttttgtccaccttgttgttgattcatctgaggaacattaccacttagtaactgattaattgtattaaggtggcttctttcaatttgctcgttattcttacaaatttgtttcaattgtggatcttgtacctgattagcataattcgaatatttttgtatacaaatttcttcatgacttttttggtcttctagtaacattttttctttttgtgttaaatttacttgcataataaaacacctccatttttattctttgaaggtgttctattttttattcatctataaattaattttttgcctcaggtaagaaagccttgtcataaaatcattttcgttttaacatactagtctacttaagaacataaggtgaatgtagtgtctttgtgtaaaacaaatctactaaattcaccctatgttaattccctatatcttaaatacggatactgcttctaataatttatctgcacattcttttgtcttatgtgtttgttctacaacttcttctgttaaattaactacctcatttgacttatttgcaattaaagttgttcctgtagcaccttcattagttgcctctgcaacttcatttatagctgttataatatcttctgtggaattaatcaattcatctgatatttcacctatagtactaactaattcattaaatacaatagcatcatttctatattgttcccctgtgtctacaagtttgtcatagtctttcatcacttgagttccaataaaattaataacttcatttgatgttcctttaaggtcattgacagccataacaacctctttatttatctgctgtatctccattgtcgtttcttttgagttttccgcaagttttcttatttcatctgctacaacagcaaatcctttgccagcttctcctgcccttgctgattctatagctgcatttaatgctaatagatttgtttgctcggttatttctaatatcctagctgttaattcatttattttatctaccgccttagatttctccacagcaactcttaaactttcttgcattttcgaagttatgctgctagattgctctcttgattgcaacgcatcagatttaagttttttagccctttcttcaatttcctttgcagttatctctccactttcaacacttgattccatagtctttattatagatttcatatttgttgatgaagcatttacttcctctgtagatgccgccgtttcttccatacttgcagataactcctcagttgtagctgatacatctgaaatttggttatttaagtctactatattctcttgtgtaaagtttattgaatttagaaccacattgcattcacctttaacaccagatattatatttcttaatgatctttgcatctcatttatagacttaaacatttttcctatttcgtcttctctgtccacatattttttgtcaacctctactgtaagatctcctttagctagtaactccatttgctcttctgcgtatcttattccttttgtcattcttttaattacaatatgtattacagctataacaattaataacgatataaccgctgaaatcaaaataacattaaatattttattataactttctaatgttttttcctttggaatctggctacataatatccaattagtctttgtattttctaagttaactggatatgctaccattaaaacttcctgtcctttttttaccgaagttccataagtataaaattctttaccttgtgaagtttcacttataactttcgcccaagttgcattattttgttttgcatctttcatctttaggcttggatcttcaccacttgctacataaataccttgattagatatcagttcaactgtgcctccgagtggcgttttttccaatataaatttttctaatgtatcaagtttataatctattgatattactcctaaaaactttccgctatcatctactataggcatagctaaagataccatggagatatcttgtccattaacattataaactgttggttctgtaatataagttccttttaattcctttggcttattataccatgtcatatctgtctgatcatcatacgctggtaatactactattttatctccatctctacttgcatatggtataaactttccatcctctgcaaactcttttctgcctttatagtaatcatcttttccatcaaacgcattagcgtcaaatgcaactgtaacaccaaaaatttcaggatctgtctttaatatttctttttgcatttcaataaccagatctctattctgagaattaagcttaatttcattggttagtgaaccccttaaatccttacctattgtttctaacttttcaaagttagatgtaatctgttctgcataagatgaagatatttcttttgctaaagtttcactatccattatgcttttagactttatttgtactaatatacttgcaaacactgctatataacacacaagaattattgatcctattattatacttatttttgttcctaaattaaactttttcatcatgcaacgtgctcccccttatgttctaatctattgcaacaatataactaattatagcattaatttgtcatatcttgtagtttcttaacataattctaacagttttatactaattagtataattattgagtatttttattttacaaccaaatcttagatttattagcaccttctctaaacttggcaatagaaaactaaagtatcctaattcaaactagttcagactttctactaatttaattgctttaaatgtccgcaatatacactattaattataaattggtattatcttattagcatctttcatatatttctttagagatatgtgcaactcttttttcatatttactgaagcgaaaaagacctcttccaagctgttaattttattattcttcaactgctctcttaaccataactctgaaagaccaagcttcgctaaagtatcacggtgtactttcccatcaaccactattggatacgataaagaaaccacctttccagttatattcatgtcttctacagttaattcggctttattcactttcttaagtactgaaagttttccatttgcttcaactatccctaaatgtacatcactaatatcaaacacatcattctctcttaacatttgaagaatattatcaattgaataacgaatttccttaagattggggactatgaactgtccatcccagattacaactgttggttcaaatgtaattatatgaccaaactttctgtattttatttttaatgttgaaactactttttgaaaaattcctattaaaactattgctactgcagtatgtatatgctcaatctggggatctgctatatcagctcctactacagcacccaatattatgattactaaaaaatcaaaaataggtaattccccaatagatcgctttcccatgtataatgcaattgctagcataagtggaaaaatagtaacaattcttcccaaaagaatggataactccttaagcatttccatattgtaatttcctttctaatcattattttaataatattctttattaagatttaattatatattggaggaatacttctcttatctttcatataatccccgagagaaacgtgcagttcttttttcgtgttcacagatgcaaaaaaaacttcatctaaattttttatagcaagttttttcaattcttgctgtaaccaatcattagatagttcaagtttagaaagcacatcttcatacacctttccatcaattattaccggatacgataatgacgagttctttttttctaacttcatgtcttctattgtaatgttttccttactaggctgctttagtatagataatttaccgtttgcttcaataatccccaaatatacgtcctttatatcaaatatcccttgttcccttatcatttgtagtacattatctattgaataacgcaatcttttaagattactttttattagtttaccgtctacaacaactattgtaggctcaaaagtaataacatgacccaactttctatatttaattataagttttgaaactattatctgtaatattcctattagtacaattgctactgcagtatgaatatgtggtattgctggatctgctatatcagctccaactactgccccaaaagttattattataagaaaatcaaaaaccggaagttctccaatggatcgttttcccatataaaatgttactcctagcatcagtggtagaattgtcactattctaccccctactattagaagttccttaactaattccatataaacacatctcccttaatggtatatctgcaataatagtgttaccaagtaacataataaacattcatgatattttctaattgctactctttaaagtattcatctattagtaccaaaatctttacagcttctgattaagcagtgctctagtaattgttggaaaaagcaaaattaaaactatgctactaatttatcacatctttcataaattattagcatttgtcaatttaatatcattctttttggccttattgtcaaatgctaatataatctaaatttattattggctcactgtcttttttaatttcctttgctcttaactcaattttctgaatctattatattaacttcattaaatatatcttgtataaatttctcaaagttttccctttgagtatgcatattatctttatatatctcttttgaagttagtgtattatttaatttttcagcgtttaatattctcatagcttggaatttgttttcttcatataaatctcttaaagtttctcctattcttaaaagattttcataatgaattccacttgaaaatcctctaatttttgattcatctgtatattcgctggcaaaaaataaagatttagcaagccaaccctcatcagcaattcccattcttgtggtattggttaaaacaaaattcaagtattctgagaactcagtaaacccacctgtaatagtctttattccaacaataggataccatagtcctttgatttttccgctatttgttcctgatgatctaaaaaaagctagagtcactttttctattccgtaaacatatttaatacttacatcaattaagccaatcatcctaaaaggtttattagaatactcattagctctaaaactctcattatatatttttaatattgctattgaatttgacataatacatgcctccttcacttaatcttttgattgtttcgaaataaaccatgtgatgttaaagatataatatcacatggtttattttttaaaatctattcatatttttgattttttcaagtcgttttcttatttcttcaatatctctataactttcctcaatacccatgagtttttttagaaatatcttttcttctgaattcaaatcaagttcttcaaaccaaggtctttcttctaattcagtttctttatatgatgaataatataaatgaattagaaagtcacctagaaaccagtagtccatctctctaacatattttttattatctataattctagctaacccaaaatcaattagcgataattctttattttctttcaatattacgttgggaagtctaatatcccggtgtacaacattattattatgcagtacctctattagttctagaatctgtactccgatttcataaatctcacttctactaaattcatattcatccctgactaacaagtcttcaaagactataccttctatatattctaaaatatagccttctctatattcatctttaaaatttgatataaactttgggaatttaggattgtctaaaccttgtaatattttctcttcatagaacaatttttctctagttttttcaagcatatcttcttttaattgttttattacaaacttttcacctttatcatttatagccaaatatgcaattccatatcttccctcacctattaccttaataattgaatatccatttattatttcattgatgttgtaatacctatccatattactgatctctataaatatctatctataattctattatctgctataggattcactatatggtctgctgtaagaatagcttgcattgctttgtgatctgctgtcattacttcttgatctactctcattgctccttgacctgctttcattacttctagaatgacttgaattacttcttgatttactgtcactgcttttagatctgcttgctttataatatccatgtcctttatatgactcattttgataaaaccccatataaaacacctctttcgtattttttagctataataagctatttttcacttatataatatgaatgaaatctatgttatgttacttaatttagctaaaaatacaatggatatatcttgtagtttcttaacataatcctaacagctttatacaaatcagtataatcatactgtacgagtttagattttttactaatctgccattttcataatttatacccacaagttacacaatgtccacagattacctagctatataatttcatagaaactaaaaaagtctaaccctatggccataaactgctgggttagacttacattagcttaattctaattttcttcaaaaatttattcagaaggtttagttacatgcactgtgcctcttggatgatgaggtggtgcataaatagcgtatactttaagaggtttgttacctgtattaataatattatgccaagtacctgcaggaaccatgattgcaaagtcatctcgagcgtttgcttgaaactctaggttgtcttcgcttcttcccattttaacaattccttgtccatcttcaatacgtatgaactgatctgtgtctggatgaatttctaggcctatatcctcgcctacattgatgctcattaatgtaacttgaaaatgctctcctgtccataaagcagtacgaaaagtagtattttgcttggtagctttatcaatattaactactaaaggctgtggtccatagtctttaagatccattttgctatttccagttgctgattgtggaatatcagccctataatcgtactccatttcatcaaatagcatagaatatgggacagacctaaaattagaattctgatatgtccaattattattgtatccgttctctaagttataatctgatgtttcagttaaataatctactgaatacatgctatcattattcatactttgcttccttgtttattatttcaaaaatataatatgttataatttcatggatgttctatatttttgtaaatattcgtattgtgagtcacactttttaatgtgtactatttacaacataaaaatttagattttattatatactattttatattttccctatatatgccatataagtttcctaaataataacttgttcgttcttttataacatgtcaatgtaatagccatcattatcaattgataacacacttcgacgttaactccttgatttttgtaagatataaatatatgatattactttcagttaaaatatctgataaaccagctgatgacatacatctctatggacatggaaatatatatgccaaatataggtaaactaactaagactttaacttatgtatatagatagccgaaataagaattatgctgttgttccaatttctaatgaaacatttcacaaaagcataatttttgtttctagtttgaatatatttcttagtgcaaatctaacttattattgttttatctatatataatcataataatctagatacagttatgctaaataaagcgatggattaaacatattccaccgctttatttgcaaatctgccttcatacacttttaaaagtggatttttgcaattcgtctgaatttaaacctatattctattatttataaatgtgcattaattttatttagtatattttgttttggcataaagcctgataaattttctactggtttcccatctttaaatacaatcatagtcggtactgcatatattccgtacttttcagctatgctttcgcttgcatctatatctactttaaagaatttagctttgcccctaacttccctactagcttcttcaaatactggagctaacattttgcatggtccacaccaagttgcgaaaaaatcaacaactgctattccttttgagttctcaacattttcaataaattcattactgcttattattctagccataattaactcctccaatttataatctaaatttttgttttcctatactttaagtatagtcttattttcaacttaattctgtgacttaatcaccatatattttgcttttttgatcactcagtattttaattttaatttaatgtttatcttatttactcaataatagctgcacttgactttgtaattcatcttcagttatttctcctaaatgatcattaactatacttccatctttatcaatgaataaagttctaggtatagatataatattataatttattgaagcagttccatcattatcaaataaaattttcatatcataatcattatctaatataaattttttagctttatccattgtttctctttgaccatctgttaaatccaccattaaaactgttaattcttctgctttatatttacttgaaagcttattaaataaaggcatttcttctttacaaggatgacaccagctagcccaaaaatttactataacaggtcttcctttataatctgataacttcactttattaagcttttcatcatatacaacaaagtccttctccgcttttttatcttgttcagtaggattgtcagtctcttcttctttatcctgagaagtatctttacttatgtttatacctttcttatcatattttggacctaatgagttatacgccaaataagatatagctaaaaatcctgcaaaacctattgctgttactgttaatattaattttttatttttcataaaaacctcctaaattgtaaggaatgaaattaatttatttaggtatccactcataattgcaattcccgcaattataaggattagcccagataacatatttataattttgtaatttcgttttattaaattaaaagtatcttttaaaccatctattaaaatagcgcatattataaaaggtattccaaggcccatactgtatattaaaagcattattgtcccttttaatgcatcatgagagttaactgcaatcattaaagctgcacttaagaatgtgcctacgcaaggtgtccatccaattgcaaaaatcattccaaataaaatagatgataaaaacttaaaagtttttatttgcacacttatctttgagcttctttctaaaaatgatattttaaataacccaatataattgattccaaaaacaattaatattaatccgcttattatatcaataatattactttcggtttttatgaagcttccaaaagtccctgcaagacttccaagtagcgtaaatatcactgtaaatcctgatacaaatcctaaagaatttactaatgcattatacttattcttatcatttgttatattttctcctgcaaaatacgatatgtacagaggtatcataggcaaaatgcatggtgatataaatgttataattccttctaaaaataatagaaaatattccatagcttgtcctttcctgataaacatgagattttatgatatattatctttattatacattataaattatttattaaaattcttatgtgatttagtcacattttaataaagacctaatatatagataaatagcttttaactaacttagacttatgttgtaattaactgaaataacatatttttttattaattctatattattgacatatgccattaataagtttattataatatataaatagcatatgccaacaatttcatttgctacatatgctacatttatatacttattggaggtttatattatgaaaattgcattaccctcacgtaataacaatatcgatgatcatttcggtcactgtgaatattacactatcttcacagttgatacacaatccaaaaaaataatagattctgaaacccttgaatctccagctggatgtggctgcaaatctaatatagcatctacgctttctgatatgggtgttaaagttttacttgctggcaatatgggtgaaggagcggtaagagttttaagcaacgcaggaatagaagtattacgtggatgctctggagatgtaaaagcagttgctgaaaaatggcttgaaggttctcttatagattctggagattcgtgtcacaatcatgaatgtcataactaatatatctaataataatagactcaatattatattggtctattattatttactttcataagcttaagcttccataactttaaataacttactactctatattatttcctttacaccaatttttacaaaatcctgcttttttgttgcacataactttatcagatccacatcttgggcataccgctctatcttgatcataatttatttcataaattgtttcacattctgcacatttaaatttacaaagctttgtagtataatgtccaccacttatccttatcgccttaccttctgttagagctgtaactactttttttcttgcgctatctattatattttgaaatgtctgcctcgatacctgcattttttcagcacattcttcttgatttaactcctcaatatcctttaatctcatggcttcaagttcttctacttttaaagctatttcttcgatttgacattttggctttccacatggtacaaaataatcatcttcagggaaaaattccactcttctaaatttagttggtcttgccacttttttatcctccttggattactatatattcaaagctcgtaatacctaaatctattataaatattcatatatatgataagattaagttcctatatttttttcttaatcaagtacttaccttactagaagtttgaatgtaattttattagtgcaatatatatatttaattatactagattaaataaaatgcttcaaatttgtatacagaattgccaatctgcatttttataaccatttccaagtaaatttaaaggcatatcataactaatgtttttgccaccttatagtccagatatgattttaatagagggattatggggatggttaaaatattctgctattaacaatgagttctacaattcgataacacaagttagaaatgcagatgaaaagtttataagaaatataaatatgattccaactcgtacaatagacaggttatgcatcaaaatgttgaaacaagtttgcaatatatgtatatatgttaattatttttgtttatgcatactgtaaacacagttcctttattctccctactttctacatctattgttccagaatgcagagttagtatcttcttcacaagagtgagcccgattccactcccctcaattttatgtctgcttttatctccacgatacattctttcaaaaacataaggtaaatcttcttttttaattccaattccattatccttaatttcaataataacagaatcttcatcactgtcgacattaatccatactgttccacctggcttgttaaatttaattccatttgaaataagatttataaatacttgctttaatttatcataatcgcctattaccacaaaatctctgtcttcgcttttattaataaataattttatgtctttctcagctgcggcaatagaaaaatcttctattactgatgaaagaagttcacttatattaactaatcctaatttaagcactatttcatcagattctacttgttttaacgagttcaaattatttaaaagcttaccgaatcttattacttcatcatttaagctattaagtttatcagtagttattggtataattccatctatcattgcttctaaattattttgcaatacatttaatggagttctaatttcatgggatatatcagatacaagtctttttctgagtagatcctggctatttaatttctctcctaaagaatttatactctcagttaaattccgaatttcttcaatactgctttttacattcaatctagaattataatttccttttgataagctcacagaagtttttgaaactgcctttataggttcagaaaattgcttagataaaatcaaacttattgctgtaactatcatcaatgttaatactccgctaaatacaatacttctattaatttgccccttgaagcttatatcttcctgtgaaagcagaacaggtgaatattgtccaacaataatataacctactgtttttccatttacatctatatcaaaaatattggaagtatacactccagtttcttccttaccatttaccttcatatgatttttattttgtatatcttcatggttcatttcccatacaacttttttattatcatccaaaagacttaaacaataattactcatatacgcttcatgcatcatttcttcccctgaggtactattccatccaccatcacttttataaacttgttgaaagtactctactaaccttgtatttctttggctttgtatcttctccatatacttattgaatgtgttcgttatggttatatttaccaataaagctgacaaaagtacagcagctacggagcaagatataataattatactaagacgctttctaatactctgcctcataattcatcaccaaatttatagccgacttttgtaacagtaagtatataccttggaactttagtatcttcctcaattttcttacgcaaatttttaatatgagcatctatactcctatctgaaccgtcgaaatcaatcccaaaagcccgctctattattgcctctctcgtaaaaactcttcctttgtttgtggctaaaacgcataatatatcaaattcatttggagtcaaacttacatcttcctcatttaatttaactgatcttttatcggtgtcaattattaatttattattatcaaaagaaaggatattttcttttttccctcctatccttctaaatagtgcattcacacgggcagtgagttctcttgggcttaaaggttttgttaaatattcatcagctccaatatttagaccttctattttatcacttaacgtacttttagcagttaacataaaaatatatacatctgatatttttcttaatatcttacaaacttcctcgccatctatatctggcaacattaaatctaaaatcacaagatcaatcttttcttttctaaataattctatcccatctaatccattttcagttgcaaacaccccatatccttctttttctaaatatgcctttacaacctctgatacgcttttttcatcttcaattattaaaatgttgttcataacattcccccccatatagttaattgtaatcttactttatcatatatttaataatttaacataaaattattcctcaaataaattctcctattattttaaacttcaaattctgttacacctaaaattatcttctctttatatatttattttaccgcttaactgtggaggaattatgaagatgccatacaactaatgattttttatatctgcatttaataaaaggtccaagtgctatttttattcaacacttgaaccttttgaatattataatttacttgcttttccttttgcaactaataaattaaatatgaaaaatcacctaaaattatattcagtaactatcctttctctattcttagtttggtcgttaaaatattcgtaaaatgatagtgctaagaaactacctgtaatattataaacattattaaaacctaagttttgtaatgctaatgttgcattataacttctttgaccagttctacaatgtaaatatactggtttatcttttggtatctcatttatcctttgtctaagttcacttaatggaatattaattgcgtttttaatatgtccattagcatattctcctctttctctaacgtctattatataagcattacgttcaacaagtcctctgactagatctatattaacctgcttaaaatcgccatttaaaagattagaaccaacataaccagcataattaacaacgtcttttgctgtagcaaatggtggtgcataacataattctaaatcttttaaatcctctactgttccaccaaactttatagcagtagcaattacatcaattctctttgtaacatcacctttacctatagcttgagctcctaaaatttttcctgttggaacttcatataataattttaaatgtacaggcgatgaattaggcattattccaactttatctgtaagtattactcttacaacatcatattgtatattcatgttgagaacatttataagtgcttcatttaatcccgttgatgctccattataatcaaaaacttttatagctgatgaacctatatatcctttatttaagcctttctttccatttatatgatctgcaacagatcttgcctgcttttgagctgggcctgcaagggataatttcacattggaatgggttaatgaattataaacttctatagcatctcctactgcatatatactatcatcattagttttgtaatttgtatctacttttattgctccagtttctccaatatccaactctgctccttttgctaaggctgtttccggtgatactcctattgccattacaacaaccttcgcactaattcttttgcctgatgatagtatcaccgtatctttttcaaacttttcaactttatcaccaacaattaaatttataccattatcatagagttctttatgaaatatttgaaccatatcataatcaaaaggtcttaatatttggtcagttgcctctattagggatacattataaccagcatctcttaagttttctgctgcttcaactcctatatatccaccaccaataactgcaatatcctgtgtatcaattgatttaacatatttatttaacttatctatatcaacaacatttcttatagtgaaaatattaacttcttcaattccagaaatattaggtacaattggtttagctcctggtgataatattaacttatcatagtcttccttatatgtttcaccagtttctaggtttttaactgttacatacttctcctctttatttattgataagacctcattgtttatccttgctttaatattatattgaacaagaaatttttcaggactcattagaaccaacctatcagcctcgtctattattccacttaagtgatatgggagtgcacaatttgaaaaagatacatgaggtcctttttcaaacattattatttcatcttcttcactaagtcttctaagtcttgctgctgcagatgctccccccgcaactcctccaactattaatatttttttcttcatgaccatttcctcctaacctcaacctataattttcaatataaatcgttattaattatgattttatacctattaagctctatgtattttcttctcatacttattactattctactaattaagcttataacaattagtaaaaattctgttgagttaccttatgtttattttccacaattatttacctatttccttccatgactttattatatataaatctttagaaaatataagtgacatagtcacataaacaaattataacaaaaaaagagagagcaaaccaattcatagtctttctctctaactaatacctaagcataaggttcataaaggacaacaaataaaaatgtcctatagtctgcttaatacttcagatataaatttttcttttcctactctatccattactgccgagattctttctccttttactccaatttctttatagcattccataatcttatcaactacaaatactatatctttttcttcaaatatctttcctaaagaatctcctattcttattcctcgtccaaatcttccaccaacaaaaatttctgcacctttttctttaataccaactgcattggttctacatagtctagaacattcaccgcaacttacacataattcttgatgatatactacttttctatttactacctctaatgctttttgcctgcagcctttaacacaaattccacatccaacacagttgtccaaattaaattctgggattgtctttcccattattccaatatcatttatattagcttttgcacaattatttgcacaaccaactattcctattttgcacttatgaggagtatctgtagcaaaatatttttcctctagttctctgcaaattgcctgagtatcaatgttaccatgcagacatacagttcctttgcatgcaactaatggccttatcttttgaccagttccaccatgacgcagtcccaaagattttgcttcttccattactttttctgcatcttcatctttaatccaaggaacttcaatttgaagtcttgttgtaagtcctgaataccctcgtccatattttttagcaatcccatttatgttgtttaattcttcaactgtaaaatttcctgctctacttaaaaaccttactgcgtaatgttccgtatcattttgtaataaaaaacctaatgccttcatttctttttgtctcttctcattaaccataataatcatacatctccctaactatgaattactaattctttctcattttgtttcagtataatagatatatgatgataaataaaatataaatacctaatgataaccattaaaatatttaatgattcaagatttaaaatgccataataaatattcttacccctacaatagctaatgcaactgcaagacttctaattatagctacaccgtgaatcttttttgaaagcttcgcacctaactgcgctccaaataatacacctatagataaggcagctgtttggataaagcttgactgaagcactccattgactatatgaaccatagttcctgataatgacattactgctagaacgaaatgcgaagtagcagttgcaatatgaacggggtaatttaatatattaacaagtactggaacatgtattattcctcctcctatacctaaaaaactagacataaaaccaacaaaaatacttacaactattccagttataggattatatgaaaatgtgtgttctaccccttcaatatctaccactgttcttgtaatatagccattcttaactactaatctattttctactttctcctccttggtccttaatatcaagaatacagatataataactagtaacacaccgaatatcccattaaaaagctgccttggtacgtatgatgttataactgatcctaatattgagccaggtagtgttgctattgcaaaaattattcctgatttataatcaatacgtttcatcctcgaataagcaaaagagccagataatgcattaaaaaatacaactgctagagaaatactagttattgtatctggactcttatctggatataacaataataaaataggtaccaatataaatcctccacctgcacctattagagttccaaatgctccaactaaaaatcccaagggggttaaccataaaaattgtatcaaatttaaaaccttcttccataacaattatgcattataattaaacaagtttctaaaatttaaaaactattaattatattaatataactctcctatattatacactaccttttaaccattttggatataagttttaaatttttagatttaaactatcattttaaattaaagcttttgatttaatatatacaaactcgatttagacaagatagattggatagccattagagcttaagtaagagaagaaaattaaagtctatgctcttacttaatagaatgatttttcattttatgtagttgaatatataagaaaaggataaaagaatttaacccatcaattggtcttcaactcttttatcctctattcatattgtaaaattcttagtcatatcagtaataaattctctgtatattcatattttgatttgtagatatataactactctaattatacatttagcagaaatataaaatatcttttttagaaactaaatcttaaacttctctattgttaatcttaagtcctctgcaattgtagataatttctcacctgcatttgcaatttcttgaattgttgcagattgctcttccatcgatgcagctgtctcttctgttgcagcagcattctcttcagaaatagccgctagattttgtgttaattcaataattttgtccttattttgagccattaatcctgtagaatgattaagttttgcaattatgtcttttataacgtctattgcttcggctattccttcaaattttccttctgtagctttaacactatctgcttgctctacaacaacctgatttgtttgtttcatcaaatcaactgcactttgtgattttgcctttaattcatttattatagttttaatatcacttgtgaagttattggattgttctgcaagctttcttatttcatctgctacaactgcaaaacctttaccagcttcacctgctcttgctgcttctattgcagcatttaaagctaaaagatttgtttgttctgcaatactttgaatcatagtactagcactttcaattttttctgcactttcattattactcattataatattatatacattacttgatgcattactattttcttgtgtcttagtaataagctctttcaaaatataaaacccttcttctttccgcttctcaatttgaaccgctgcaacatttagttcttttgtataatttgaatcttgttccaataagacacctaattcttctatattattagctactacttctgtgtctgaagcttgttctgaggctcctttggcaatttcctcaatagttttggcaacttcctctgatgcagtagctgcttgttctgaagtagcagttaattcttctgaggatgcagcaatatgctctgtcgtgtctacagctttttgaataaagtctgctacattttctctcatagttttaagacatcttatcatctctccagtttcatcttttctatttaagtacttgtcacttagttgtttattttttgaaaaatctaaattagcaaactcttttactctacctgttactgctataataggttttgttatactgctagaaacaaaattagccaaaatacttactaacactaatattattattgatgaaattactactacattcattatttcttttgcgccagaatctaactctttttgagtaataaatgatgctaatatccaatcagttccttcaactttatatggatttacaaggtatttttctccattaatcaaaacttcaaacggttttgtttgatcacttagaagtttatctagaccatcaatactaacttcctgtacttttttaaaattattttcatgattttttccatcagccattattatacctgtattatgtataatcattgaaaagcctgtctcaccaaacttcatttgatttaatatatcactaattttagattgcttcacgtcaagacctattacgcctaaaacttttccatttttatctgtaaatgaacgagcattacttgtaagcatctcagacataaactcatatggctctgttctaataatctttccatttttattttcagcatcaatataccaaggtctttttacaggatcataacctgcaaatgtagtagttttcggccattgtatatatcttccatccttagttcctaaatatacataacttgttccttcgtggctatttccatattgctcaaataccttgtatattgctttctcaagttctccattttcagaaggtttcatctgagtttcttctgttgtatttttataagttgttatgctgtcatctgcatccattaccaattgattatttgccagcatatcgaggtttttatttatttgatcatagaaaatatttattgcctgagaaactgtattcatttgttgttttgaattacttagataatcattataattctttttatttacttgataaactgcaatgctgcttatacttacaaccgttatcaaaacaactaatactgtggatattaaaatccgtccctttatcccgcccaaaactttattcataaacatcccttccctttttgtaagaatttaatcgtattatatataattctatattcgactttattttccttcatcgaagcatattttttttataattctttaattattcaaagtttttttaatttgtttatactataatcctaaaagataagtgttttaatttaaatctctttagctttatttattgagaaatttttattatataaatattctcttttttattcaggccatttatcacgcaataaaactatatatatgttgcaattcacaatgtacatttcacaattatggctgaaattcttgcgatatttttagaattgtgatgaagaattattttctcaacgtatatattagtacaaaaaagataagccgatatatcataaaaataccagcttatcttttacttaaaattattctcacttcattaaattatttttaaaatttcagttattaaacaaattaaatgatattttataatattataaaaaaaggaactctaaagtgaactcatttttaacaaataaaattataaaattactctttataagtattccctttagatttgctattataataacttgcagctataaatattatccaggcaataactcctgttaaacttattaactgagccattctaaaacttcctatcattaaactatctgttctcattccttcaattatgaatctacctatagaatacaatcctatatatgtaaaaaatactattccattttttttgcattttctgagcataatcattagtattataaatatagttaaattccagagagattcatataaaaaagtaggattgtaatatagtccatttatattcatccccttttgaatgaacataggaaaatgcttaataaattcataactaactacatccccatgcgcctcttgattaaagaaatttccccatcttcctagtgcctgagctaaaataattgaaggtgctgccacatctgcaaacttaataaagcttaattttttaactcttgtataaattaatgctgttcctaatgcaaaaattagccccccatggatcgcaagtcctccatttcttatattaaaagcattaataatattatctttatagttatcgaattcaaatattacataatacagtcttgcacctattataccaattggaatagataataatacaatgtttagcaaattatcataatcaacttctctccacttacaattatattgagatattagtattccaagcataatacctgttgcaattaatatcccataccacctaatatcaaatcctccaattgaaaatgctactggattcataatttcacttccttatcttctaattttgtattttttgtataaccatagcacaagctcctacagctatagatttatcttcaaaatatccacccctaataaattgaatattattattttttatgtgacacttctgaagagctatttcttttgtagtttcataaaacaactttgattgttgtattaatgggccacttaaaattataagctctggattaaataacttaatataatttgaaagtcctattccaaaatataaagccgtatctttgataatactcatggccacttcattttctctttctccaaggctacaaacatctatataattaatatcatttaaatttttatttaaccaagatactctattttcttttatttcatctataaacttttttgttatattggatattgatacataactttctatacatccataatttccacaggaacacaactctccatcagcatcaacaaccatatgtccaaatgcatcttctacattgttaatagttcgaattagaactccagatgatatgatcccagttcttattcctacaccgcaattaatatatgcaatattctttttaccttttccaaccccaaagttatattcacctataacagctgcattagcaccattatctatacatattattgtatcaaattctctttttagttcatcttttaattgatctgagttaaatccatcaactattcctattccaattccgataattgatgctttttgtatttttaatttcatacaacattcttttataacattaggtataatttcagatattgtatccatatcatattcatggcttaataatttttcttctattattttcaatttcagatttgttataactattctagtgtaaattcttgaaatatcaattccaataatataaaattcactatgatttacatcatataaactaggctttcttcctcctgtagattctccaatgtcactttccacaatgattttttcgtcaattaatattttaagatctctatttaatgtagttaattttatcttagttatgtttgccaattcatttttagcgataggaccattttcttgtataattcgaaagatatatctgcacctatcatttaaagattcaaaacttttatatgctttcaagaaactcgctccctttctcgtattagtatatcatcttttagccattatggatataagttttaatctactttcaaatataagttagttttaactctctgtatttcatttgactattaattctttgatggcgaataaatgatgatttcacttctctgtgcatattaccttagcatattctaggcagcatacttccctctaaaggcgataagaatctctttccaccaaatccgttttctataaatatattctgattagactctttaacaaattcacctataattctcgctcctttcccttgatcaagtgagcgaattatatcaagtactttttgggactcggtttctttaacaactagtaccattcttccctcacaagccatatataatggatctaatcccaaaagattatttatagccttaacactttcactaattggaatttccttttctattaagtgtatcccaagcttgcaaagtgatgaaaattcgtgcaatacagtggctaatccgcctcgagttggatccctcattatttttattgaaggaaactgttccttaagttcttctataaaaggaaatagtggtgcacaatcacttttatagtctcctttgacctttaagttatatctctctactgcaattgttgttccatgctcaccaattccaccagttactataattctatctccttcttcaataggttttacttcatatccgttaattatatatccgattccgcttgtattaatgaatattccatctacacttcctctttcaactacctttgtatctcctgttactatcttagctccgcattctaaacaggtttgccccatagacttaacaatttcttcaaggctctgcattgaaaatccttcttcaattataaaactcgaacttaaataaagggtttttgctccagatacagctaaatcattaatagtgccacaaactgcaagcttccctatgtttcccccagaaaaaaacagtggctttaccacaaaagaatccgtggtgaaagccatttttccttgtactgctgtaaatgtcgctgagtcttgctcttgcaaaagaatattattattaaaatatttgtaaaaaagctgctcaattaatatttttgtatgctttcctccatcaccatgaataagcttaatcatttcattcatttattccactcccctatacttataaaaaatagagcaagatccctccgtagataccatacaaggtcctattggatgctctggtgtacaaccttttccaaaaagctcgcatttattaggtaatttcttccccaataaaatttcactgcacgcgcaagttctaatattgtctttctcagaagtcttacttaaatttattccaaatctttcagaagcatcataatttttatatttctccctcaaagtaaatccagaatctttaataactcctattcctctccattcatgttcgcaatatgtgaatacttcactcattaattcatttgctcttttgtttccttcttggcttacacaagttttatacaaattttcaaaacttttttcagttttattttgttgttccgttaaaaaatataaagcactagcaatatctaaagcttcaaaacctgcaattactgctggaatattatattcctctacaataaatttaaaataatctgctccctttactgctgctacatgccctggacacattaatccatttatattgtgattaggctgcttaagtatgtaatggagtattggctccattcttttcattcctattaaaaatgaaatatttcttatatttttttcctgtgctatctttacagctaaagcaattataggagttgtagtttcaaagcctactccaagaaaaactatttctttatctttattttcttctgcaagtgctattgaatctaaaggcgaatataatactttaatatcttttcctttttctctttgcttaattaaattctctctagttccacttactctcatcatatctccaaaagtacttaaaatcacatttgaattcttaagtaattctatagctgcatctatgtagccttctggagtaacacaaactggacatcctggtcctgacagtaaatttatattaggattaaccaattgtctaattccaagttttgaaagtgcctgagtatgagttccacaaacttccatgacattaaactttttgacttgagacttttgaatttcgttaagaatatttttaatcaaaatttctttattcatactttttcctcgctattaagtattgattgaaatatactttgtaattcttcaaaataatccttgtcaatcttttgaatagcacagcctgcatgaactaaaacataatctcccacttttagttcttcaataagctgaatattaattctgctttctaatcccataatatccattattgcactatagttatctatgttcctaacttgtgctggaattgcaagacacataaacttaccttccttctttatttacacttacaaaaatcgtaaatcaatctgacgacctatttttcataacacagcataggtagattaacttagtaaatacaatatgagttcactttacttcttggtcctatgaaaaatatacatgacaaatttgaatatattatttcttttcaagaattgcatttgcaacatggagctggccaaaagaaattccctcatcattagttgggatttgttcattataaaacactttaaatccttgcttaattagatttatatatattccttttaaaagatagctattttcaaaaacaccaccactaagaataactttatctatatgctccttttctctaagcttacaagctaaatcacatgaagctttaataagtgagttgtgaaatttagacgatatcttagaaatcaattcctttttctgaatatctctcaagattccttcaataatgcttttatattgaatattaaaaataccattttcctctttaatatcccatgaataactttctttaattttataatcaataatattttctaattctattgccgcctgtccgtcataagatatactatttctgattccacataaggctgttactgcatcaaacaatcttccaacacttgaagataaaaaacaatttatttttgaatctaaagcttgtttaactactttaattttttcattatctactccttgaattattttttctggatcataacccaaagcatataaataacttaaagcacatctccaaggttcttttatagcttgttctcctccttggagatttacatatttcaattgccctgctcttttaaatactcttcgatttccaaccaaaaattcgccaccccatattgatccatcaagtccaaatccagtaccatcaaatataattccaattacagaatcataaatagaatgttcagccatgcagctaaccatatgggcatgatgatgttgtacttctatctttcttatttctttttcctttgcatatttagtacttgagtatgctggatgcatatcgtacgccaatacttctgcattaatatcaaataaattgcaaaaatgttttagtacatatttaaaattcttataacaattaaattctcctaaatcacctaaatactgacttaaatatgcgtatccatttttagaaacacaaatagcgcttttctgctgccctccaatcgctataatttcatttttaactcctgtttttaatgaataaggtctatatcctcttgcaccacgaacaaccttttctacttcacctatgacttttacaacagaatcatcaaccttaacgtaaatctccctgtcattcatcagaaaataatctgccactgcatttaaatgttttagtgcttcttcatttttatgttccattggcatactgcttatatttccactagtcataactaaaagatctaacttttcattaaataatagataatgaaggggtgtatacggaagcattactcctagactattttgctttggtgatatagcctctggcaatatgaaaggatatttcttctttaaaattacaatgggtctcttattactgcttattacttcctcttctttatctgatacatagcaaatctctttgataactccaatatctttagccatcaaagctaatggtttatctttcctttgttttctacttctaagcaaattaatagcttgctcatttcttccatcacaaactagatgaaagcctccaatccccttaatcgccaatatttttccttcttcaataagtgaaacagtttctttaataggatcttcgcacttaatctgatctccacgattatttgttaaaaagaacttcggtccacaatttccacaacaatttggctgcgcatgaaatcttctactgagtggattctcatattcctctttgcattcatcgcacatagagaagtctttcatagtagtattctgtctgtcatatggcaaagcctttataattgaatacctaggtccacactgagtgcaatttgtgaaagcatatttataacgaagatttcctttacttcggatatcttctagacattcatcacaaactgctatatcaggtgaaataaatctcatttcattcttttgtttagtactctccttaataacaaattttttataaatattttctttaattacgaatttattttcatctaaacatgaaatagtactaaaatcttttttaattaaagtgcactcaactctttctatttttgcaatactgggaggtctttttataacattaaaaataaactgttttatattttccctctcacctaaacagtcaattactacggcaccacctatattttgaacagatccacgaattttaaaatcttttgctttttcatatacaaagggacggaatccaaccccctgaacaattccgtaaatttttactatatatctcatatattaaagaccttctctatttatatgttatgagctatcgcactaagtaattttcattctatatattgttttgtatacaaaaaggcaaactcaatatattgtataatgcactactaaagtgatagccacttgttctaattttcaccctgatcatatctaacgatgtattgggataatatcgagtttccaatatagacttctaattttcattttgttcgccttgaatacttttaagaattgcagtttgatcctgtatatcttccctctgtacattaatttttgtccattttccaactaactttgaatcaaaattctgaagatgttcataaagattctcctcattaacatgacttctgtgatttacaataacagtgaatgttttaactttattaatattattagtttcacatatattctttaattcttctgaaatcttacttaataaaatagtatcatgcatatttttcactaccccttcatttattttttgactgtaacttaagtacatataattctatttcatctaaaatctttttagaaatcccttctaatttctcttgtaattcttcgctcaatcccaagccaattccaacatcattaacttcgattccataaatttgccctttagtacctggataaaaaagttttaataaatccaagaaattataactatgctgggaatatccctttttcttagaaacaaaattatctaactgcaaacaagtgatttcacctggactttttccataatatgcagcatccaaaataaatatatagtcatcttcttttacactggcaatactgtattgaacatcggtttctccataaataactttaatattcttttctaaaagctttttttctatcttttttgccacttcaattcctataccatcatccctcattaaaacatttccaatagcaatcactttaatattagagtttaccataatatatatttctccactttctataaataaacgaatttcaatccaaatttatactttaaaatgtattccacactagaaagaatgaatactcttttgtgtagtgttgcatctgagaatatagctgtaggtatttctttagcagaagttgttccactgttgcttgtcatgagcttccctcaggagcatgcaacagtgggtgcaacttctgctattagaaatccacagctgtattctccagcaaccgaaacaacagagtattcattctttcggcgagttatcacataagtatgctttttaacttgtttatctatgcatatatttttaaaccaaaacctctactatttctgtatcacctgctgatccaatcaaatgagttgcacaagatacacatggatcaaatgatcttacaatacgaccgatttctataggctctctaatattgtttaatttagttccaatcaaggctccttctatagttccaggaagatttgattcatccttaggtgataaattccatacggttggtgttatgatattataatgattaataacatttttatctatttcaatccaatgaccgagagcacctctagtagtatcagttaaacctgcaccataagctttttctggaatattataagttttttgattattaggtcttagttctaccctttcaataagcttattcattattcctataatcttttctgtttccaacacccttgctatatttctatccatacatgaatgtccatttgtgtattgtccactcactattaaccttgctaaaggaccaacttccataggaagtcctaaataacggggagcttttataaaagtgtacgcatctaatttagataaatctacttcttccaccccttcgtcctttttataccacgaataatggatttgctctgtgattttatctggttctaaaggatattttacattatccttcattactcctggcttaacataagtaatctcaggatcttcatatttatcaaatactccataagtcataaaatatggataagattgtccttttttaaaatagtcagagtaatatttagaaattatctctacatcttctttcattatactttttacaaaagattctatctttctaataatgctttttactttttctagtttatatgcatctatattcaccgtaactccacccacaaaaataccatggttatgaggagcttttcctcctagaagtgctaatccttcatgagctaatctactgagttcaatactttttacataatcctcttctatttttctgtttattttatctggtagtctataatcagtatactgttgttcttctattaattttatgtttgatatttttacataacttggcatagacagaagataaaaatgtctcaaatgattttgtataaattcaaagccatgtaaaatatctcgaatgtaattatcatttaaactaactgttacttttaatgcatcttctagcgctaaagtagaagccattgaatgagcagtagaacatattccacaaattctttctgtaaaatatacagcatctaaaggtgatcttcctattaacattttttcgaatcctctaaagagtagtccacttgcatttgctttagcaattgtatttccttctacttctgcttttatttccaaaaacccactgattcttgttactggatctatagttattgttttgcccataactcctccttgtggtacatgaaataaaacaattgatcagtatacttgtccactattttatttcatgtgcctaatactttacaaaaggttccatcccatctggaaattgctcatttgcacatccaatgcaatttgtattatctccaataggccagttaacgtatccattccattttctccttgggcaatcagtttttgtaacaggccctctacatcctagtttgatcatgcaaccttcatctccaaacttttgtgcaaatataccttgatcaaaaaatcctcgccttgtacaattatcatgaatcgtaactccataaaaaagtagtggccttccctcgctatctaatgcaggtacaccataaccaatcaaatgtgctaaagttcctactacccaatccggatggcaaggacaacctggtagtttaataacttggcgatttaaaacttcctgtacacttttactttctgaagggtttggttttgcagccgatatgcccccgtgagaagcgcaagttcctactgctacaacatacttcgcttttcctcctgctagttgtattgcctctaacgctgtgatatttgtcccattataatttgctacaatgttataacgccccttttctcttgttgaaactgccccatccactaataatataaactctgtatctagcgtttctaaaaacttttcaaaagcaagctgcccttctaatcccataagtgtgttgttataagtaaaattcaccatgtcagttaaaatatcataaagcccaggattttcactattaagtaaggaaattatatttcctgagcatcctgtcacctcaagccatatagcattcatctttttagtctttttatcttttagcattcctacaacatcatttgcaagtctctttgacgtatgaatcttagcttttgtaagtggacatgcttttccacttgtcaacctaattcctccatcatttattacttcctttctcttattaaaaaattagaacttttcattttctctaataattatcattaatataagctaaattatgtactggttttagattccaaatacgttcaatcatttctacagctaaagtatatgattgtaatgatttaaaaatgctacactctattcccacttcttaactttataagatttaattcctttagatagtattattattaaaataaatcacttcggaatttctcctataagaatcaacaaaatattagccatattttttaaattataatcaatgtttttacaaaattttgttatttattatggttatttctacattttttcgaaaattttattattatgttttatttttatccaatttattgtataatatatccgtagtattatattatgtaaatatgagaggagtttttattatggtagaaaaaatgttttgttatcagtgtgaacaaactgctgggggtaagggatgtactaaaataggtgtgtgtggtaaaacacctgaaattgcagcaatgcaagatttattaatttatcaattaaaaggaataagtgtgtatgcaaaagaacttttaagcaaaagtgaaaaggttgacacatcagtagcctcttttgttgaagattctttatttatgacattaactaatgttaattttgatcctaagtcccaccttattcaacttaaaaagtctcaagaaattaaagagtctttaagagcaaaggttaaatctgaaaatatcacctctcctgaagcattgtacaacctaagtgattctaaagaatctatacttgaagatgctgaaaaggctggaataatgtacgatgaaaacttagatccagatattcgttctcttagagaaactataaaatatggtttaaaaggaattgctgcttattctcatcaagctagatttataaaatatactagcgatgaagtaaatgacttctattttaaggctttagcagctttagctgatgatagtttaactcttgaagatttgattaaacttgcaatggaaacaggtactatgagtgttaagattatggaagttttagatactgctaataatactacttatagctctccattacctacaaaagttaatgtaaatattaaaaaaggtccattcatagtagtatctggacatgatttaagagatctagaaatgttacttgagcagactgagggtaaaggaataaatatttatactcatggagaaatgttaccttcacatggatatcctgaattaaataaatatcctcatttagtaggtaatttcggaagtgcatggcaaaatcaacaaaaagaatttgataatatacctggttgtattttaatgacaacaaactgcttaatgagaccaaaagattcttatatagatagaatattctcaacaagtgttgttggatttgatggtattaaacatattgaaaaagatgaaaatggatataaggatttctctgaaataataaataaagctcttgaacttggtggtttcacagaagacgaagaagtcaaagaaatcttagtaggctttgggcataaagctacattaagtcatgctgaaacaattattaatgcagttaaagacggaaaagttaagcacttcttcttaattggtggatgtgatggtgcaaagcctggaagaaattattatacagagtttgctgaaaaaattccaaaggactgtattattcttactttagcgtgtggaaaatatcgtttcaacaaattacaatttggtgaagttgcaggacttccaagattgcttgatgttggacaatgtaatgatgcatactcagcagttagaatagctttagctttagctgatgcatttaactgcacagttaatgatctacctttatcaatagtattgtcttggtatgaacaaaaagctgtatgtgatttactagcgctactttctttaggcgtaaaaggaatgtatatcgggccaagcttacctgctttcttaactcctaatgtattaaatttcttagttgataatttcgatcttaaaccaatcagtactcctgatgaggatttaaaacaaatattaggctaaactttaaatttggacaataaattgttctattgtaaaatgcatgaaaccactgtataaaattaaaaaccatgcaataagtgatataaatcatcttattgcatggtttttgttattcggactttgcaattagttttccaacaacttatgttatatataattcctcaaaccttcttcatctataatgattattgtttttgttcctattatttttattaaattttcatcttctaatttttttaatttcctgcttatggtttccctcgtcaccccaatataattagccatatcttcccttgatatgggtagttttacagaaatattaccgtcaacattttctccatacttctccataagctctataattaaataagccattcttgagtcaacatcgttagttgctaaattctgaacaagattttcaacttttgataatctttcccctactgtttctaatacctttattccaatctcaggattcttcatcattatatctttcatttcctccttagtaagagtacatattttagcatcctctatagctttagaattaaatccatatttagatggttttataagttctaattccccaaagaaatctccttctgaaagtatatgtagtatctgttccttaccatccttagtatatttatataattttatttttccttcatttataaaataaagtgtattagctatattaccttcattaaaaataacaccgcctttactaaattctttatgattaattctatttacaatctccactaattcgtctctatttaaattttcaaatattggaaccttactagcacaaagtcctcctctgcaattattgcagcaattaccacagtgaatattcataacaaatcctcctacatataagatatatctccaaataatatcttactttaagttgtgtcacttgtatatttaatcctaactaaaaccacttaaacaatatcctccttagtattattataatgaaaaactcataaaaacttaatcttaatattttgatttgaatcatatttttataattgagataggtatacaataaaaacatcgaaagacaacaacatagaaaattaattgaaatataaaaataagtcaggaccacccgtcaaacgggtggcttgctctgcgcctgtaaggctaaaaaatacatagagcagtcttttctcgctgttagacttgctatatattttttaattgtgtggttattctatattttaaatgcagttatcaaacttaagttttttcgtaacttatagtttcgcattaacagtattagtttagtggtagcacagagtttgtggtaaaagcatttttttagaatactcatagtttttaacggtataaccaaacacccaccacccgcttagcaggtggttttcttacatgctaaagcataaaataaaaattatggaggttttatattatggaacaaaacattatgctaggtaaaaatatattttgggttggtaaggtagatgatagagatgtgccttttcatagattgactttaactaaaggaactacttataacagttatttattaatgacagaaaagcctacagtaattgatactgttgatatgagttttggaagagaatttgtacaaaacttaaataataagattgaacttgataaaattaaatatattgtaattaatcatacagaacctgatcattctggtgcccttggaagcttagcagccaaagcaaaaaatgctgtaattgtatgcacagagccagctgtaaatgaacttaaagagatgtacaggcttcataatagagaatttttagttgtaagtgatggtgatactttagatataggaggtaaaattcttaaatttatacaaacaccatatcttcatactgaagaaactatgataacttattgcgaagataataaaattttattcccttgtgatattttcagtactcatgtagccaattatgaatacttcaatgacttagctcaagtagacataaaggaagactttattacttattataaattgataatgcatcctcacagaagatatgttcaagaaatgattgaaaaaatcaaagatttagatataaagatgatagctccttctcatggatttattattagagatgaagtccaaagctttatagatatttatgataatatgagcaaaaatacagagctagataaaaaagcacttattctatactctactatgacagggaatacaaaaaagattgcaaatatttttaaagaaaagtttgaagagcaaaatataacttcagagcttattgatgtaaataaagatccaatggataatataatgaatgctattaatgaagctgacgcaatcttctttggcagctcaactaaatatggtgacatgattggaaatatggaagaggtactaaaaaatcttaaaactctaaacttagaaaacaagctaggcgcagcatttggttcttatggctggagtggagaggctatagaggttatacaagactatttaaataaaactaatttaagatcattaaatacttctgatataattaaatctactggtatgactgatatagaattacctctaagaattagattttcatcaaaagaagacaacctaaagagcattgatagaatagttacttatactagtgatttattgtttagtacaatttaaaataatgcacctgaaaagaaataaagtgcccaaagttgccgtagatatttttcatctataatctacatcaaaaggatcttgtgagattaggcacaaaacagcctttctttcctaagatccttttgatattaaatataacatttatttgcttagcatatgtgtctcaccaactatttaagcaaactattattaatatttaaaattcttctaacactttctgaccaaaattctttccaaaggctatgcacgcttcaagttcgtcatcatttggcatatatttaaactttaatccatcttcaacaactttaattttagcctttgttaaatagtttgtaagaatatctgttgattctcccccccatccataacttccaaaagctgcacctactttctcattaaacttcaatccaattaagtcttcaataagaggtaataaagaagttaaaattccattattaactgttgatgatcctagtattattccctttgatttaaaaacttcggctaatatatcgcttttatctgaagtagcgacattaaatattttatattctacccctgcttctcctaggcctttgcctataaattcagccattttatgagtagccccccacattgagttatatgcaaccactacacttttatttgattttccggctgcccactcataatatttctccactatcatcattggatcttttctccaaatgatgccatgagctggagctatcatatctacaggtactccaagttttttaagttcatctattttttttgtaaccagtttactaaaaggagtaagtatgtttgcgtaatatttaagagcttcctgattaacttctgtttcatctacttcatcattaaaaatgctcgaagatgcataatgctgtccaaatgcatcattagaaaacaatatattttctccagtaagatatgtaaacatactatcaggccagtgaagcataggagcttctataaatacaagattatttttacctatatttattttctcccctgttgaaacgaccttaaaattccactccttatgataatgcttctgtattgactctaaaccttttttcgaaacaaaaactgttgcattaggaatatactccattaatgcaggtaacgctcctgaatgatcaggttccccatggttcataacaacataatcaatcttagatatatcagttacctctctcaaattttcaagaaacatctctgttaaaggctcccatacagtatctataagaaccgttttttcatctttaataaggtatgaattatatgtacttcctctatgggtagataattcatttccatgaatatgccttactttccaatcggtggcgccaacccaatatactccatctctaagttccttcatactaattcctcccatttgttaaattctacttcataagttctataaaatgtataattcaactcttaatatacgtaattttctgatagattatacttagaacttgcagtactaaaatttaaaaatatagtattataatgatgctcaccctgtgtgtataaattcaacaaaattcaggtggagttaccctcccacctgaaaagtttcactttattctaaagagaacaaaaggcaactaaatttctaattgccttttttgttgctaataatctcaataaattcgtctattgaatatttagctgcttcattaatattaacttctattttattttctataagacttttaatcaccatgaatttcttattgtcacctaatacgatagttccaactatatgattattacttataagtattttataatacttatgttcattatccgatccttcaaccaataaatctatatcttgatctccttcaatatatcccattgaaaacacagatattccaaaagcgcttaatgaagttactggtgctgaatgttcaaaaattaaatcttgattacatatattcgctcctgcaactttaccttgctgcattgccatactccataatccatagactctaccgttaaattccgaaacatctcctgcagcaaatatatctttcatattagtctgcattttgttatttactactatccccttattcaccttgtataatgaacatgtagtaaaaattcattatacttttcctttcttaataatttttactatacttaacataagacgctgtggattagttttttcacctatagctagactatttcaattgaggatataaccacagctttatgcttatttgttaattagttagataacgcatgacgttttatatagagcaaggatacatttagcatgaagctacgtggagcatagcggactaaattaaaaaaggagttgttcttatgatttatattggcattgatgtagctaaagctaaacacgattgctgcattattgattcagatggtgttattattaatgattctttacgtatatccaattcacgtgaaggttttgaattactttattcttcaatactttccgtcctacctaacaaggatatttctaacgtaaaaataggacttgaatcaacaggtcattatagcactaatctccaaaactatttgtatgctaaaggctttcacctatccattctcaatcctttagctacaaatctttcccgtaaggctcaaacccttaggaaaactaaaaccgataaaacggatgcactagttattgctaaaatgcttttctctgatgatacaaaatcctattcacctgtatcatatcaaattcaagagctaaagtcactaactagacatagatatcgcttaattggttatagatctaggcttaaactatcaattactagacttatagatataatttttcccgaattaccaaagtatgtttggtctattcatcaagtctctgtttatgctctcctatcggagttaccgagcccgaaggaaatatccaattgtcatttaactaaattgacaaaccttctggctaaatccactaaaggcaaatatagtagagcaaaagctattgaaataaaggaagtagctagcaattctatcggaactagcacacgttctttatcttttgaacttcagcaaattattaggttaattcgatctgttcaagctgaaattgatgctttagataagcaaataaaggatgttgttatagaaatagactctcctttaatgagtattcctggaatctcttatacactagcctcaataattctagctgaaattggagatatagatagattcactgatccagcaaagcttttagctttttcaggacttgatccatcaacatatcaatccggaaaatataatgctacacatacacctatggttaaacgtggttctacctacttacgttgggctatattaacagcatctagaactgtttctatgcgtgattccacttttggggattatcttgcaaagaagcaaagtgaaggcaagcattactatattgctatgagccatgtagcaaaaaaactaatacgtgttattttttatcttttaaaaaccaatacttcatttgtttcacaaatttaattccttaattttccaagcaatgtgattgctttatttgtcatgcacttttttattgactaaaaaatataatttttttattaacttatattgacttcatatagttagtctctaaatcagtattttgggcaattgaaacattgggcataattccagtggaataaataaccatgtcacaagcaccttgcgctccagacttagttataaaccctttgaccttttcttccccaaatatttcttgtacttgagtatccagcattacttcaatattttgagcttcaattgatttctttaatttatctgacgcaaattcatctaactgacgaggcattaaacgtgaagcaaattctgcaataataacttttttcccacattcagataatatattagcaatttctaagttctgaactccccctccaataagaagtactctcttaacattatttaaatactctaaaatttttaaagctccatctaatgttcttaagttaaatacacctggcttatctatgcctttaattgggggcgtaagattacttgctccatttgctaaaagcagtttagtataaggcacacgggttccattttcaagaattgcttctttattttttgtatctacgcctgtaaccttattatcagaataaacctgaatattattatccgtataccatttctttttttgaattaagagcttatcttcctccaaattgcctaaaagccctttagaaatcttaattcgatagtatggataaaacttttcctcaccaaatataacaatttcactttgcttatctatttctcgtattgctttagctgctgaaatggctgcaataccactaccaataataactatcttttcttccaagaaaaacacctcttttttgttcataaaaaatatatgaatgtcctaattaggttccttttattatacctatcagctcgctatattatactcctaagtctatgtaattatatataaaacctatttctttgtaatagcaactctccacacctcaggcccttgttcaatatatttccactcaaattgctccggaagttcaattataaactgataatgaagtggtctagggtcatgatcatttataagttccatcttctcaccatgaattagcccctcaaaagttttaaaaatcattgggtgtttatccttcggttcatatattctagcatctacagttgcagtataatttaacataattaattcctcctaaatttgtttatttgttaataagatttatttcactctttaatccattatagctttatttattcaaataaaatgtgattagaatcaaataagattttaaatatctaaaaatacgtttgctaattgtatcctttcattagttccccaatcaatatatctccgtaaacaaaaaaattatatacataattaattcctaaataggaaaagttaatatcgatattaatagacgcatgaaagaaaataatatgcttgtatttctattaattttctttcatataggaaagttaaaggagtgaaattttagtgagtgaaaaaatgctagaagaattagaaggatttaacggaagagtaagttatcatgattctgtagaggaaatggtaaaaagaataagagatgataaattatcaaatgtatttgatagatatgcttctcaagaaaagataagatgttcgttttgtcttaaaggggtaagctgtcaactctgttcaaatggtccatgtagaattaatgaaaaaggtggccaagaaaaaggtgtctgcggaatagaccctaatgctatggctatgagaaactttctcctaaaaaatataatgggggctggtacatatagtcatcatgcttatgaagcttttagaaccttaaaagctactggagaaggaaaaactccatttaaaattactgatgtagataaacttaaatggatgtgtgaaaaagtaggaatcgatacaaatcaagaagttaacaaaatggcaatcgacttagcagtattgcttgaagatcagcaaaagatagatgcggaagataaaaatattatggttgaggctttcgcacctaagaaaagaaaagaaatatggaaaaagttagctatatatccagctggtacagtacatgaagagcaaaactgtgtggctagctgccttacaaacgtagatggaagtcatgtttctctagccatgaagtcacttagacttggaatcgctacaatttacaatactcaaatagggcttgaaatggttcaagatatactatttggaactccaaaaccacatgaagtcaatatggatttaggaattatggacccagactatgtaaatgtagtatttaacgggcatcaaccttggcctggagttgcaactcttttaaaagcaagatctgctgaagttcaaaacatggcaaaagctgcaggtgcaaaaggacttagaatagttggttctatagaaacaggtcaagaattacttcaaagatttgagatggatgaagtttttgtaggtcacatgggtaattggcttactatagaaccattacttgctactggtactgttgacgtgtttgcaatggaagaaaattgttcacctccagccatagatatgtacgcagaaaaataccaagtcactttagtgtctgtaagtactataattgatttacctggtattgaacataagattccttatgaaccttcagaagttgataagatggcagataaattaattgaacttgccattgaaaactttaaaaagagaaaagaaagaaaaattgaacctttagttccaaagaaaactcaaaaagctatagctggtttttcaactgaagctgttttaggtgcacttggaaataaaattgaacctttagtggatgttattgctgccggaaagatcaaaggagttgtagctcttgcaaattgctcaactttaagaaatggacctcaagattccatgactataaatcttacaaaagagcttataaaaagggatatattagttgttagtggtggatgcggaaatcatgctcttgaagtagcgggtctatgtactgttgaagccgcaaatgaaatggcaggagaaggtttaaaagaagtatgtaatatgctaaaaatacctccagtattaagtttcggaacttgtactgatactggcagaatttcaatgctagttactgctcttgcagatcacttagatgttgatgtatcagaacttccaatagccgttactgctccagaatggatggaacaaaaagcaactatagatggaatttttgcactagcttatggtacttatactcatctatctcctactccttttatgactggcgctcctgaattagtagaacttttaacagaaaaagcagaagatgtaactggtggtaagatagccctaggtgataatcctgttgaagtagctgaaaatatcgaagctcatattattgcaaaaagaaaaggtatgggattaagctaatatattttgtaaataagattcattaaattaataattaatcctctaaactaacaataagtagaacttcctttaactatttaaaatattcaaagaaagttctacttattaagattttcattattaataaaatctacattctgaaatatcgcataaaacattactctttaggagtaaaactgcaatatcctatttcatcacatctacttttcatatcatcccatatttcattatcttttatagcttctattgctgtagggtataaaatataattttccttaaatatgtgatctcttaagttaaatactatatactttgatgtatcatctactttttcttttacttccttaaactcagatttagaagcattttcagctattgcttttaaggacttcttcttccctcttaaatcatcatgttccattctcattattctagttggaccagtaatctttctctcttccatctctgaaaataaaacttgctcttctcttaaatgatgcttttctgcatccaaaatgttatcaataacagttttcaatgaatcgaattcttttgcgcagctatcataattatctgatttttgaattctcgaattaatctcctcaagttctgttaaaaatccaaggattttctcatgctcaataataaatgtatcaacaacatgtcctggtttaatttttgttttaattttatcaagttcatcctttaagacttccatgtgaatatcacaaagatgccttagatcttgcggattcattcctttttctattaaattttgttctgcaattgataactcaattggatttatatctgaaacaatttctaaagcttcttttcttagttcatctgaaactccatgtttgtttaatttttccaaaacatctgttaactctttaatttttgtagtattcattttaaattcctcctacatacctttattatttatatgttcattctataagaatttcatttataaacatgtgattcaaatcaaaattcaaaaatattttaataatgactgaattatgctgaaatatctatacataaacatcagtactaaacttattaagtttgttaaaaagcttatttatataaatttcacctcaaacgctgtaaaagttaataaaatgtggttaaacacttttaaattgcgtttgaggtgaaaattcactttattatgacatccttatgatttatttgttatacctcttttgaataaattgctgatggatttggagcgagtattacaaagcaagacatatctttctctccagtattttttaaactaaagatttcagttcctttgcagtgtattacatctccttgaataatcttatgtgaacttccatctacccccagttcgccttctcctacaagaacatgaacaattaaatcgctttgttcatggttgtgaggtggtactccttgacctggcttaaaatttaagacaaagttaagtactctgttctcattaaaaagaactctcttagtaaatttttcttcactatattcaattttttccgatattttttctattttcatactattcactccctttcctaacttatatttaatatttcctatttttataatatgattcttcatattatgtagtcagttcatactcagtaagataaataaatatacttgaaattcctttcttaactataagattctaattgcattttcatttcttctaattgcctatctacaatacttgcctcttctatgtgatttgttatagtttttgatgtcactcttaaaatttcatccacatttattatttctttactcatattttcgatatgtcgtttttgatttgttaaaatttctattactttccttacttcctgctcaacttttcctatagaagataagctttcttctatcttttctgccgcattcactgatgcattaacccctttagcaataacttctttagatttatctgaattatttataacgatatttgtttcatcttctatattaccaattaacactgaaatatccttagtgctttgcttagtcatttctgctagatttcttatttcacccgcaactatcgcaaatcctttcccttgttctccagcccttgctgcttctattgcagcattcaaagctagtaaattagtttgattggctatattagttattaactttacaacctcattgactttactaaaccgtcttgccaattcatttatattttcagtattattcctattctcaccttctagaaatcttactactttgacaatttcctcaatagcacttttgccttcatatgatttattaactgtatcttttgtaatttcgataagattattcccttcaaaatataatttatctgtcaagtcattagtattttctgtcaaactagaaatcgcattcatatgtcccttcacttcatcagcaagctttcctaaaacatcatgttgatcatctactctatgatgttgttttacaatccccgctaataatccactcattttctgaaaaaaattactagtatcatcgtgcaatttttttgccttcattatagtttcttcaccatcaattgattgcttattttctaaatctttaattttcttatttctaaataggttcattcagctcactcctaaattctttcaaatatataaatttttcttaaattatatattgtattatttttatatcctgcttcttcgttcatgacattagctagatagaaacttatagtaacaatcaccaaatctgtttcttaatacaattttaagctaaaatgttcaaaaagaatgtgatttaaatcatatttcgctaaattttctgtaattgtaaatccataggttgtaagatattctaatttagttgttgtaagttttgttgcaactgtttcagcttataattcagaaaagtcatctcttgaagctagcactgttcttgttcatttatatgttaatcttaatgttgctatagatattcaaagttataaaacagtctctctagttaatagttaagtgatttatatcacggcactattatcatttatgttataaagttatataaaacctataatagtgcagttttacttgaataattttacagttgaataaaaaaacaggttcttaagctatttttaatgactcaaaaattttttctatcggcgtaccgcttgcggcagctttgtaaatatatattactttggacttttctaaatttttttagcaactttatatccagtattaaagtgaagagaatcagtacagtatattttgcaataagtataatttactaacattatgattagatatctattaatgctttttccacttcttacttgatatctatctagtcctaagtacgttttgcaatctctaaaaaatggttcgattgcccatcggtcggtatattgagttaaaatatctaacggtactaatgatttctctaaggaaataaaagttttcaatgctccatctttttggaaagcatctttaggataacttaaaacaatagagatattctttctatcttttaagttgccaacataattgtaaatgtagtattgcttatctttgacggtgacgaggtcaaagtcttcaatctttaataatgtagcaaacttatgaagttttattcctagtctttcatggccatacggaaaaataaccctattagtttttaaagaaccaatatagctatagccggctttttcagaagcattaaaaatatccttacaactataccaactatctgctaacacatagcctttattttcaggctttggaagtgttgtaattaatttttgagttatttctattttactcatatattctttatcatagatatcaattgagtatggcagcactaatccgttacacgatagtaaagaaactactatttgatgaccatatacattcttaccttttaaatgagaattatgaaacgaacacttttcaattggatttttagcctttgacgagggctttgtcttttcagaaatagtgtcatcaataataaagtatattggctgtttggattctcttgatttagcccaaataagttctatgatatatgcttttaatgctctttctaaaagtttttcattccaattgctatttgaaaaaaatctagtaatactagttcgatgtttcgaaggagcaagctccgctatgtcggaaattttaccgttataaccttttgatatcatagcattcattatattttctaaatgtcttaattgaggcttagttaagtaaaaatcaaaatttagttgttttaaaaaattgtatattgatagatcatctgatataattgtgttctgaaacatttatgtatagctccttgctgtcattgttgtgtggtaactcaattataacaaggatttatcatagatgtttttttattttattcagttgtaaaattattcaagcatttttgcactattatagtaaaacaaagtttttaggaggaatatagaaatggaaaaaataaatgttaactatgaaaaaatgtattacggatttcctgtaattcttataagtttttttgataaaaatgggcttccaaatgtaactactctttcatcttcctatagccttaaggatatggtagttcttggctttagtagcaaaggatatgcaattaatcaaattaaagaagttcgtgattttgtaattaatatccctgacagttcacttaggaaagaaattagcttttgcggaactaaatctggtcatgaagttcaaaagtttgacgctaccaaattaacttattctaaatctaaaattgtaaacgcaccaatcattgaagaatgcccaattactatagaatgtactttaacagatgttatcgaaaaagatgcctatgcaggtattactaatattcttggaattataaagggcaggcttatttcaaaggaatatttagatgatgaaaacagattaaatatttcaaaatttgataaccttttatattttggggatggaataaacaaaggatacagatatattaaaaatgagcaataatataaggagggagctatatgtcttacgaagctatttgggctaaaaatcaaagactaaatgacgtagaaattataaaacttgaaaaggatggcttagatgtaattgaaactataattgacaaatactcgaaggaaggttatgattcaataacgcctaaagatatgaatagatttaaatgggctggcgtttacgaacaaaagccaagagagggatactttatgatgagagttcgtattaattctggaataatgacttcagagcaagcaaaagttttagcagggattgctaaagattatggacgtggaattgcaaacgtctctacaagaggagctatacagtttcactgggttcaggtagaagatttaccttctatttatgaaagattagaagcttgtggcctaagtccttttgaggcttgtggcgattgccctagaacaatagttggaaatcctcttgctggaattgataaagatgaacttatggatacaactgaacttgtagaacaagttaataatttcttcttattaaacaaggatttttctaatctaccaagaaaatttaaaatatcaatatcagccagtatacataatgcagctcatgcacaaattaatgatcttgcctttactccagcaacaaaaaaaattgataatcaggacgtaattggtttccacgtatgggttggaggaggactttcagcaagccctcatttagcacaaaaactagatatatttgttaaacctgaagatgtactaaaggttgctgaaggtgtatgtactatttttagagattatggatatagggaaaaacgtactcgtgcccgcttaaaatttttagtagctgactggggatcagaaaaattcaagaataaattattagaattcactggggatatgccaagctcaggtgatgataaattagcttcatggaatgcatcttattattttggagtacattcccaaaatgaagatggcaaaagctatattggtgttagtttaccacttggagaaatcacttgtgatcaacttttagaacttgcccatatttcagaaaaatacggagatagaaaaattagaactacactatcacaaaatttaattattacaggtataaatgatgaagagatgccttctctattaaaaaaagatgtatttaaacaactttctccaaatccaagtatttttacaggatacacagtttcttgtacaggtaaagaattctgtaatttagccattgttgaaacaaaaaaacgtgctaaagaagttatcgaatatcttgattctaaactcaaactagatacaccgttgcgtatccattttacaggttgtcctaattcttgcggacaaaaacatatagctgatatcagccttcaaggtgcactaataaaaactgaagatagctgtgaggaagcctttaccatatggcttggtggtacactaaacaatggtgggcagtttgcagaaaatctaaactaccgtgtaaaatctactgaggttcatatagttcttgagaaaataataactttctttgaaaaaagtaagttagagaatgagacttttaatgaatttatcgcaagagtaggaattagtaaaatcacagaaaacatataaaaacctaattaaaacataaccagtgagatatttttatgtcccactggtttaatattttattctttcttttttccaacagctgcaagatatataataaattcttcatctccatccagccccaaaagagtatctatcatcttttgatcataaattcctatagcacatgcacctgctttgattgattcactggctaaataaagattttggcatacatggccaacatctattaaaatctttttatgtgccgtaatatcaaacttccattctgaacgatatggagtcgtgctccaagcaaataacacagcagctttctttgcaaagttaggtacaaaaggctggtccaaagtaatttcatctattttattgtcaatttcatctaattcaaacatgaataaaagtttatgctctactggtagatatctataaatacctttttgtatcccatcaacattcataataaataaatatgtttcaaaagaatgcgttgccccactacagggaactgtccttaaagttagacctgctttattagtttcagtaattccttgagtagcccataatagatacgacaattcttcaagattcatagacttttcagcataaagccttgtacttcttctattacctatacacttataaatattagaattcgttacagtttcttcacttacccttggtaaagcaacaattctagattgcgaatcataagattttatactatctggctgaggtatacctttcattttatcagtttttatatttttgaattcgtcaaaattagatttcaaaaaatttctctgcttttcatatcttgtcataaaaattctcctatcctatcttttggaaaatataatatcataatactgaaaaatagtatgtatcatcagttacgtttattgttctataagacacaattatttctatattgtaatgttatttaccaaatcattttatacaaaacattctttactatttaaatcatattagcatcttcctaaacaagctccggaatttaattctttctaattttgaaagttttttataaaaatgacttgcaacatatatcctttagatatatattagatatatctaaaagatatattggaggaaataaaaataatgaatgaactttttattctaggcgaattaatggaagaaccacaaagtggttatgatctacgtaatgccttacaagcttctttaggacgtcatcgtaaagtcagctatggagtaatttatccattgcttgaaaaattacagaatgatggttttttagaaataactaacgtagaatcacacggaaaaaataagaaaatggcaacaattacagaaaaaggggaagaacgtttttttgaactaatgaaaatgcctgttccaagtggagcccatactgctgatatatatttaattaaacttgatgtaatgcagcaccttacactagaccaacaaatgcaactattggatcaattcgatcaagaacaaagagatataattgaagatacgcaatttgcactaaaaaaattagctgaggaaaattcaagagatcactggtatgcaagtaaaaggtttgaattacgactacagcaggcaaatgttgcaattgattggattaaagagtttaaacatgaactaaagaaagaatggtgataagaatgacaaaagaaataaaagtggctttattaatggctgctagtctctttatggagattttagatggaacaatcgtaacaactgcactacctaaaatgtcccaatattttcatacaggttcatcaacaattgctttactcgttagtgtgtatttgatcacagttgcgatttttattcccctaagtggatggatggctaatcaatttgggaaaaagaaaatttggattattgctgtcatcctctttaccattagctccttaagcagtgcactagcgcctaatttctctttacttttgataatgagaattatacaagggatctctggtgcattgatgacacctaccgcaagactgattgtgttagaaaaaacaccagcttcacagctattaaaaatgattagttacttaatttggcctgcactcatcgcaccagcaatagcacctttagttggtggatttattgttacctactggaactggcaatggattttcttaattaatgtaccaataggtttaattacagcattaataggagcaaaattaatagatcctgataaagaaaaaaataaaactttatttgatcttataggatttatagaaattgcactttcatctggcataattttggttggagcagaaatagccactcacggaaaagattattggcttagcgcgctaggattagtaattttgggaataatacttggatttatagttttcaggcacttaaaaaaatcagataatccactattttcacttgattcactaaaaataacttcttttagaatattccaaacaagtggatctgttctatggctatgtgttggagcattaccgtacatattaacaatttttttacaaacagtctttcaatggtcagcagtaaaagcaggtagttatgtgctatttatttttgttggaaacattggaattaaaccttttacaaatataattattcgtaaattaggctatcgcggtgcactattatcatcatttggaatggtgtttgttacatcaattggtttagcattcattcaaattaatacttttcctgcttggataatgtttcttgcgctagtttcaggtgtaggacgttcattagccttaactgcttacaatggactaagcttttctgaaatagcccctcaagataggaatagtgcaaatactttgaatgctgtcgtttcaacattggcccaaggaatgggtatatcaattattacagttgttgttaatttactacaaattttcttttcaattactatctcttataaattaggctttgtttttcttggtctattgatgttatatccagtaattgaagtaatatttttacccaaaaacattggacatgctacaatcagctagttttattctaaaatataaatcactaaaatctgcgtggaatactattaatactttttaaattttatactctaataaagataaaattattcacttaatagaaatcacaatcactaagctttgtgtagtataaaaagagcagaaatattctattcaacaaaaatagattttctgctctttaaaaaattacttttctatttctcaggtatacggtatatcttaagaaattatgattctatgaaattacctatttattttgatctactttaagtgaaacattatcaatgtatatttttgttgctttaggattatttgttttaccacaacagaattttacttgtggtttatcatcatttttcatcgtaaatttcaaagttacatgtttcttattaccatcaagtgctactgcttctgatgcataagtagtgtaaggatcagcattttgctgaatttcagccaatatatctctatcttcatcagcccaagcatcaaattctaaaacataattggtatccttagctaattttatattatcactaaataacattacgttccagtctgcctcacctgttgattgaacatcaatagctgctgttttatctgcatcgtctgttatactaaatgttgccgcagctggagttgtagcaaaatgtgtccaattttcaaattcagaagaaaaatctccattgctaataagattattatttactgatgtatcaatcatgctttgtttaacatcagcatcatcaaaaccatccgattttacaataatgttgtaatcaccttgtttagtaaataagctcttatctaaagttatttgtccatctgatactttatataatgttggatcaacatttttatcttctactgttatttcttttattgaatctttccagccactatctccacctgcataagcaatattaatatcatttccaattttattatctgtagtatccggtactaatgttgctggcattttaactggtgcattctttactctaagtgaaacattatcaatatatacttttcctaatgcagggctacttgtattacccatacagaattttaattgtgcggtatcatctttaggcattgtgaaattcaatattacatgctgcttatcaggtttaagtgataatgtttttgatgtataagaagtataattggcattttcttcaattttagccactatgtctctagcttgatcagcccaagcatcaaattctaaagtatagctcacaccctttgataatttcatatcattactatataacattacattccaatttgagtcacctaatgctttaacatcaatagcagctgctttatttgcatcatctgttatactaaaatctgcttttgaagcaggagtaccttggttgtccatagtttgccaatagttatatcctaagctaaaatctccatttttgattggatataaatcaacaccatcataatttacattgttatttgttgttcttataagttgaatatcatgaatataaacatcaccatcagcattacccattaaaaattgtgtaattgaatttacatcagtagttcctttttgcatagtaaattcataatcatattcactgtcttctgttgttaaattaaatgtattttgtgcatatgttgtttgtccatctttagatgcaaatcttacatccattggtctatctttagatgcacttgctttaaatgtaagcttatagacatcgctttgtaataaattagttcctgattgggataatataacactatttttatctcctgcagcaggtagtgttatatcagcttcttttttatccttatcgctcttaattgtagcgccttcacctttgaagtcccagaatcccattccgttatctcctaaattaaaatcaccattgtaaatatgattaccgttatctaatggttcttttgcagtgcttgcattatcttctacatctgcatcagattctgttacttctacatcattaaggttaatattaacatcatcagttaatccaagattaaattctagtctaccatgaacattaggtgtatctttcattacaaatgaatattcatattctttttcttcagttgtaagatctactttaaaagcatctgaatatttagtgtatcccctatctgcaccaccaccaaattgagcttgtactgatgcattcttatctgcttttgctttaaactttaatgtatattttttattaagtcttaagggaacatggtcaactaactgaactccgtagtttacagttccaccttttttaatatcaatatctaatccattatcgttcgtaaatgtagcttgacctccacttgctgtaaggaaattccagttatcaaaagaaagattgtccgtatcagtagcttttatacttttaaacgaaggatccaaaatatagcttccattagctaaaggagttcttgcccctactaatggaccttcataagttgctggattcgcatgtactggatattggccatttaaatcatatactcttacataatctactttcatatctgctgatttaaatgaatcatctggttctacattcccatcatacgctcctcctactgccatatttaaaataatgtggaaatttctatcaaatggcgctggataagcatatggtgctggttgatcattaccttggctgaaccaattattagctgtataatataattctccatcaacataccatctaatttcgcctggctcccattctacagaataaatgtgctgccctgaaatatcttttccttctgggaatgtataatgaccaccactagatgtgttattaggccattccttaccaaaatgaattgttccccacacattattaggatgtcctcctttagcctccatgatatctatttctccgccactagcccattttccatatatgttatcatcatctggaagcatccaaaatgcaggccatagtccttgtccttttggcatagtaatagccgcctcgatttttccataagttttgctaaactttcctaatgttctaattcttgctgacgaatatttctttccaccaaattgatctggattatcttcttttcttgcttctattacaagatctccatcttctacttttgtattttgatcagtataatattctttttcattatttccccaatctactgcaccatattcatcaccatttccatattgataactccatttgttaggatctaagctagtaccattaaattcatcactccataccaatttccacttatcttgttcttgattagaatttccagggtttgaacctgaattcccggaatttgaccccgaatttcctgatgatgagctgtgtgatgatgaatttttagatgctgtactacttggcaaagtctcagtagttgttggcttatcagcttgtttcgtaacaccaacacctttattatcaaaagctttaacagcctgtggtatttctcccacagcctctccactattactaaagttatattccttattgtctattataactttaccagtttgcattgctcctgacgatgcaagggaatatacctttccatctacttcgattactcctgtttgcattgcccctgatgcatctgtaaagtaccaggtttctttatcatttacccaacctgttttcattgctccagttgtatcggtaaaataccaagttcctctatcatttatccatccagtttgcattgctccagatgtatcagtaaagtaccagattcctttatcatttacccatcccgtttgcatttctcctgatgcatttgcaaagtaccatattccgttatcatttatccacccggtcttcattactcctgattcatcaaaattgtaccatttaccatctattagcttccaatttgtagctaatccactatcatctacataactccaactaccattgtttgttgactgtttccattcagcatttactccactttggagcattactggtatcatgcttgctgcaactgctacagctataattttcttcaattttatacttttcattaattataatcctccttgttaactaaccgtttacaatttcttcacttttaactattatttatagatacttttgtatctataaataatagaattttaattagtaatatcttatttaagaacaacttttattttatgtttaatattttcatcaagtgaggttattacatttctgtcaataacaggttgtccaccaaatttatattcttcaccatttatataaatttcttttactctatagtcacaatattctttttcaccttcatttatatattcaatcttaagctttctttctgcaaagttcatttcaatagcagctttattttcaacatcaaattgctttaataaaatcttaggttcaaaggctaaattacccattttaccttttacgccaaacatttcagatagtactgttaatatgagccagcttgctgatccagttaaataatgatacattcctcttccacgttcgtttatatattcaggtacacctggatatatcctgctgatatcaaagttattgcaatggctataaagtgtatcaataaccttaaatccttcgaatgcaaagcctctttgataaagtgcatttgcatacataattgccatgtggctaaatactgctccattttctttgtgtccatatgcaaagccaaacattcttcctaaatctgtttttacttcattaaagttagtatttaatctgtaaccaccaacagatttatcataaagatatttatcagctgctttaataatactttcaacctgctcttctgttgcagtattactcataatagtaaacacttgtccagtaagcatcatgcgagttcctgattctccatctccctcaactcttctagcattattatcatagtaaccgttataccagctatagccatccttattacttatccattcatttctttgaatatgttccttaagccattttgctttttcttcaatgttactaatcaattcatcacagtctatgttagctacttttccactaatattatgcttgcatttatcacaataattttttaatatattttgtttttcttctatgttgtcataaacttcattattaccagttaaaagcaattttaactcttcagctaactctatactttttactttctttacatctcttaagtactttaataactcagcaatatctgtaagatttcctccataaagagcactaaaagcaacactttcaccgtgtttttctgccatatcaagaccatcattccagtctgcaccatgtaattttaaattattatgctctccaacatcataaaatgctgttaagtgttgtactaaaagatgctctaaaatagttcctttatgttcttctaaattttctgtacgaactctatttccttgacttaagtcccataaattatctttatctgtccctcttcctacttgaagatctttaaaatagctttgtttttctaaaagaaaatctatgtctcctgtttgttcaatatatagcttggttgttaaaaaaggccatgctccatgatccatccaaacacgcgttatattatttctatctgcaataaactcaccttgtttagttccgataattgtagcattagttccatcaaaacgaactccaccaaaattatctaaaagcataccacgtactccgcttggatccattgcaagtagagctaagcaatcttgccataaatctctccagcctcttccgcccttaccataatcatgatgtggtaagaatgaacagccataaatccttctaagcattggttggaaattaacccaatacatccaattatcaaattgtttatcctctgtttcatatgaaatattaatttttttatcccaatatgctttagtttcctcaagaagcttatcaaaagctatttctttcaaatttctttcagcaatattattaaaatcagattttgaatctccaaaacctattgctacaataaatgttttagcttcatctgcttccactactgtatcttcaaaacgtatagcaccaattgcttcataaccttctagcttagcattagccttaaccttaaattcttcatttaataaaacactctttggaatttcaaatgatccgccttctccaatatattcttctactattggacaaaaacttactggcttttctccatcacctgttgctgcaacaacgccataaacaacagtatttttcttatgtcctctttcatcaaatgtcaatgttggattcactataattccatcttctgtggtttctattctatttaaaagagatgtcacatgtctgtgatctctaatattatctgcggaacggcaatataatggtattgctacagttggtgttacttttttagaattatcacttgtattagtaatcgttaccttcattaattctattttctcatcattagaaggtactaaagatattatttcactttttataccatatttctttgacttcctagtcatcttatgccacataattcctgcttccaattctgttgcctctttatcctcactaaaagcttctgcttgctgagctgctgaaactcctgtagcagaccatgcgcctattccatcaacatatacccaaaaatttcttgatgacttattattatgaagctcttcactacttactggtgcaagtaaaaatgtgttttgccccatcttacaatctccatttagagttggagttatactagacataactccagcctcatttgcaagaggaaaatacaaatagctattattttctggatttttaagcttaaatgttcctttattatttacaaatttacaatttgccataccacgaaaaccacctttacaatgttttattaaatattattttttatttatttctactaaatctaatttcttacaagaatctctttcaataagctgcactggtataattttattaattttgagtttagctttttcattaatttgctttactaataaatcaactgcagtttttccaatttctttacgatcttgtcttatagttgttaatttaggtgtgatatatcttgctaactctatatcatcataccctattattgaaatatcatctggcacacttaaaccttcctcttttaatgcatctattgctccaattgctatcttatctgctgatgcaaaaactgctgttggtatttctttaagctttagtaaacctttcattgcactataaccaccactaacatcaaaatttactccatctgcaatatatccatcaagtatttctaaattaaatttcttcatagctttttcatagccttttcttcttattatgcttggccagttatctaatttatttgcacccgttatatgtgcaattcttctatgccccaaatcatataaatgcttaatagccaaataacaaccttctaagttatctgaagttactgttgatgtatctttattaatcatgtctattactacaataggaaaattactttctataagctctaaagtttctttatcatatggatctgtgcaaattatagcaattccatctacgcatctatatttgaaatattctaaaaaagtatcattctttaatctatcgtttttagaaccaaataataatgaatatccttgcttatctgcttgatttttaaaagcttctattactcctgaaaagaaaggatgattaagtccaactccaagattttcaaaatatacaatacccaatgtccatgttttcttagttgataaaaactgagcttgtgcatttggtagaaaattttcttccttaagaattctttgtattttaactctagttttatcacttacatctggataattatttattacttttgatactgtagttggagatactcctgcaatttttgctatttcataaattgtactcatgctgtatatcttcccttctataagctttacattgtcaattatattgtctctgaaatagtataaataaaatttatcttcaaacttactatctatttctaacttcacaggcttatctttattttctttatcaatttattaattattttcctattctcttataaaatagtagcttgaatttctgctatttcaccatttctaattttttcagcaaattctccacatacttcatttcctttaaatttaatcatattattgtctgcatcaactaaagtaatttctcctattattcctttttcaggtccaaaagtatttttattatttatatttgtataaacaagttttatacgacctaaaattgtagtaatcaacgcattatctttaaagaaatcttttgttaaaataggatttagcctaaatttcaaaattccatcttcatatacaaatagcttttctccagccatcattaatttccaaatattcagcatttctacagttgtaccacttaatctcgctacaaatcctcttccatgagttctttcatctggattgctgctacttgcaataaatgatgaattttctagtatacttcttccatatactcctggattcataaatggtggcattgcagtttttatatcatcaaagaattcttcgtataatctattttttattaattctaaaatgtacttaaattccatgtgcataaatactgattctctttcaagccaaccagctgtaaagcttcttgctctcccaatttcaaaagatacatcttctaaggattctgaagttttgtacatttttaattttttatcatagacattacttttcttaattgatttatataattcgtgcttttcaacataatctaattttgtcttgaaatatctagtaggtccttctaaaaataatggtaagaaattaatcttaaactctaatggtcttattgctcctttattgtctatttcatatttacttacgtcataatacataaatgtaggaatcttagcttcattcatgttctttgcgttctcaattcctaaatcaatcttagaaagcattttgttaattacaatttcaatagctgctacttctaaatttgaattatttccacttattgaatatttggttttttctctatattcttctcttattgtagaaaccttgtcccaatattctaattgagttaattcctcatttaaatttaatgaaagaaccttttctacttcgcatatagatttataaaattcttctggcaattttattggttcttctacaacatttaaattatcctttataaatagtaataatctttttaactctgcagtttccgaaaaacttgagccaagtaagcctggaagtccattcatagcatcattccaacctggttttccagcttccatctctattccaaatcccataggatctaaagtcataaatttaattcctgcaagaattaataactttgtgaataaatttgttttatataaattgccatgacaatcaaaaatccaattatcgtatatattatcttttttcgctaaagccgcatattgtctaacttttccctcttcaatactatatttatcctttctaggtaatacgtattctggagaattataaaatttataattttcatccttaattaataattcttttaccttatctggataaatatttaagtactcttctatcaaatcgagattgtaagtccagtggtcactccagaatccttctccaaattctatttctacagtttcactacacatttctataatatcgttcatgattttattgatttttttactttcaattccgtttatatttcttaatgaagaatacaattcccctatagtaaatttatcaactaaagtttttaccaattcttcactttcatatacattaaccaaattcaacatattttctcttttgctttcatctacatagaattttttccccttaatgaccaaaggattataaccatcaagctgtatcaaatcactaaataatttaatattttctactcctgtaaatgagtgaatatatacatccattcttctattttgatttacatctctaaagtttccattcccttgagaatagaaattaggttctatactaaagaagttatagtctctttctaaatctccatgttttctagaataaacataatatatctttttatctctattcccgaactctaatggatatccgcctcttaaaacattatctatatagcattgctttacatattcatcaaataggggatatgcagttttagtatccacatgtttgctaatattatctactaattcattactttcacttattttcacatcaaagtaactttttttgcatattttctttaatgctttattaacatcatcactattattcatatatcctacataactatatatacatgttgtatcgtttccttctaagaatgttgattttcctgtaaatgcgcaaggaactttattataagaaatcttattagtattgagtaatgctccaatagtattatttttaaattctactggttcttttaaagatgtatcgtatccaaatatattatccgaatcaactattggttttaatatatcttcattttcatcaaaggctacataaaaataactattttctactgtcccaacttgagttgtgtcttcagtagacgatcttaacttatacacagcagttctatcttctttaatttctccctgcatataacttcttaacgtatttccaattgctttgtaggttgcattatcagatccataaggtaatatagcagctaatccatctaatatttctatttctgtttttacatcagatgtatttacaacttctatttttcttccaagtgctgaaaattcttcattaggaattgtaaagtaagttatttcagtatttaaatttagtttgctgtttatttcaactagtcttaattcattatttttaatttttattattcttcttatattctcatttgtagtcatagaaaatggttcaaatacaaattcttcttcattgcttttaacctttatgaaagttctaaatccattgctatacaccattttataagcttcattggctggaaaaaactccattatacaattacttttatcccttattccaatactgcttatagcttgtcctctattaacataaaatgaccacattggtattccttctacacctgcaatagctgagagaaagctagcaaaaggagcttttttatcataattttctataacgtaaaatcctagttcatctatataatcatatttttgttcattttcttccttcataaaacacctcttttctataggtcacttcattaatatataaaatccaataaacattattcattaaacttatatatattagaagagtatctctacattatgctccttaccatcctcaaaattctttagaatattaccttcaattttttcgccatcaacttttatagaatatgaagaatctttcattctatagaaaccttcaggttttgaaattctgatattaaaggtagccttaccagtattaagagtcaagtttattgatctttgttcttctgcaagtattggatttatttctataccttttgctgtatattgaacaccaaatgcatcaaataatgatagtgtaagccaagtagaagtaccactaagtgtaggtcctatattttctccagtatcgctattgttatattgggtacagaatcttgggtttccacatgtttcatatggatgtttcattgtgttatacggtaaaactagattcatcatccaatatgctgtattagtcagctttctagctaattcatcgctattaaccatcttagcagcttttagcatagcactagtagccatcattgtagcatgcttaaatattccaccattttctctatctccagggaaatattctcctgttgcagttccagttgcaaccttctctaaatctgttggactaataagctttaatccataaggagtttttaaatgagcctctatagattcaatcattattttaatttgttcttctgttgcagaattagataaaactgcccagctgaaagaatttaggaaatatgtgccatctttatttggatctgctgaaagattatcacctttagctccaagataagtaaactctccatctttgtatctattaaatagaactcttgcaaagaaatcctctttccaagcatattgttgcagattatcataaagtttattagaagccttttcaaggttattgtaatataatgtatcttctttctgttttccgatttcaatcatttcgtccatagcaacctttaataagaaaccattcataacactttcagaataatcactttcaaatggctctccatctcttcctgttatagctatctgttccttgtatcttttttctttttcaacaccatttatataattagtatcaagttttaaacagtcattccaatctgcaaaatcaagtagaggtattccatgttttcctattgaaatttctcctgaatatcttaaaatagctttcattgtatcatataagcttcttttctttattggattacttccactaataacgaactgttcatccaagaatccaacatcgccagtaacatttacatatctatatacagcttggattagccacaatccatcatctgaccattttcctggctctttaccaatccaaaagaaattatggtatgcataaccaaattcaaataccttttcagcccattcctttattaaatttttagctaaatcttttttacccattcctataaagtaatacattgatgcgtaaatatcttgaatttctctaaaacctatttctctatagcctttttgtgtttggtcaaatgaacgtgatacaaaagtttgatataagacttggaaaggtagatttttattaacataagtatcgaattgcttatcaccagaattaacttgtaggtaactactatattcatttataaatctcatgctattattaaaagcattttgaacttctttttcattactatatttaacaattaaattttgcacttcagttttaaaagtattttcattaaaattatcatttgtcttattcgaaactaatcctgttaagttattaatagaaatttcagctacaggttgtaatgtagtttcactgctaactgcaaagaaacctggtccttttctgttcaaattactactaagtttgtataagccttctggtttttctaatgaaccacttccaacgaattcactgtagcttgtacaaaattctttaggaagaactgcccctttttcattatgtgttatcattgtatgaaatctgtagtcgccacttgtatacattggataataatctgaagctatagccattacggatccttcatcatcaagtaatacctttgcctgcataattacattgctgtataaaacatcctccatcaatgcacttggtgcagcacttccaaacataccagtgcaaacgatttttatattccttacactatttgtattattctttattttaatttgttgtgcctcaacagcaataggcatattttcttcttgaggaagtaagaaaattaatctttcaatttctaatccacacttagtcttataaataattttagtatgattttgagaatgaatacatttccctgattctatatttttgtctgtaacatttgctgaatagaatatttgatttccatcctctaccaaatagaactgacggcttgcaggaaaaccattttcttcttgaagcatatcccatcttgtagccaatacttgagtggctgcatgagatctaaagcttcctcttcctagtttatccactacgctcttcggggtagtctgtaaaggatgagaaaaatcaattctatttcctaacaataaattagtataaaaatgtggaccaggagctggagccaataaatctatttcatgctctccatcttcattgatacttcccacaccataagttatcttttctactattgcgtttatcttactactaatctcaaggtctaactttatttcagtaattaatcccttgttacatgataataaagtagtgtcatctatatttttagtaagtttaattattacagattcattgtcttttaaaatcgtatctaataatatagctatttctctattcttaaacatttctaaagtaacaggaattttgatttgtaaattagcaactccaactgacttactatatgtgctatcgtagaagataccatctataacagtttgcttttcaagcctttcattaaatatttctcttaatttctgctctgcagaatgttcaacttttctagctacaacttctctcattatttgcctccccaatatattaatttttattattttattttcattatttaaatatgtctatttttattgaacttcagcgtccttattattgtatttttcttcaatatctaggagcatacttttttccataagcattattaaataacatataatacttacaaaaaacaatggaagtatcactataaatttaattttaatgaatatattccatattataaaagctgctgcaattgatattatacatacataaattttcttaattaggtacattaatgataatgcaaaaatctctttcttcttcaaataaaaccttgataatataggaaatatatgaaaccatatagaaatacatatgaaaatcacaatcacaggtataattttcactagagtcaaactaaaattattattaaagtataataattcaatccaagctaaagttaaaaaaattatccctaatgtccaaaaaaataatgaatcaagaaaatttaccttataagcttcaaaaaagtcttttgtaacatcaatatcgccctctctcgtgagcttacccattatacttaacaatgctgttaacgcaggtccaataggtattgatgacaacattaaaataataatcatatacacatcaatagtcccataattggtcagtcctaatactacaaatataaaaggaatatttaaaatccaaaaataaaagtttgctaataaaaaccaccatacataattaaaaaatttaacaataaaaccatcattgaattctctttttttactcataattttttcctatctctttcacaactatatttctacttacaacaactattttcataatataaaattactttctaaaaaatatatacattcactttatcttatatcttcttttaatttgaaattattaacttgttttataagattattagaattatcttcaagtaattgtgcagtattagctaaactttcagctgattctgtaacttcttgagttgatgcagctatttcttctgaagaagccgagttctcttctgatatgctagctgtagaatgtattgtttcaacaatcttatctttcttttcattaatttcctcaactgtattattaatttcttctatttgtggaagaatagtattaatagcttcaatgatttctttgaaatcatgaactgaattttcaataacagttatttgcagtttcaaatcttcattaacttcatttgtagtgcttactacagtacctgtttccttagaaatatcttgaattagtctattgatatcattagatgaattctttgattgttctgctaattttttaatttcattagccacaactgcaaatccttttcctgcttcacctgctctagccgcttcaatagatgcatttaaggacaataaattagtttgttctgcaatactctttataacatctgttattttattaatttctgaaatttttatacctaaaccttgaatttttccactagcattatcaaatgagttactaattgtatttattgcttcaataagatcagacaattgaatattactgctttgtgctttattattaacagatttggtatttttctcgacacctttaattgacatagcaatacttccgatttcatcgcctaatttagaaaaagtatcatttattaccattaattcatttgattgaactgaggccccgtcagcgataccatgtatggcaacatcaacttcatgcattgtacaatccatttcttttgatatagatgctaatgatttagacttttctaaagttaatatgctaccgtccttaattacttttaaaattttagaaattgatcttatagtagatgctaattccttcttcattattcctatttcagacttttcatctgtttcaatatcaacggcaaaatctccttcagctaaagtatttaaaatactattaaatgaacagatggatttctttaatgatttaataaccacagttgcaattaagaatatcaatataattgaaataataaacaatacaaccaaaatagcactaccacttatataagctttttcagtttgaataaataattgctctgcttcagccttatttttagtaacagctgttgagattgaagttgaaaaattagactcatccccttgaaaactaagcttctgcttatcttttgagtccttgttaagagtattagtatttttaagttgagttatagtattaccacgattttttaaaacaagaaattgttcatctataatcttattcatttcttcattatcgcctgaaaattctagcgatttaaatctctctaattcctcataaatgctatcaatttccttattaatattattcatatattgatcctgtggatattctatttggagggaaacattttccctcagagtatttaagtgtatattaatagagctaaataaaacttccctttgaagacagcttgtatacattagcttaagattattgtaagttctattaatagtaacaaaagatgatactccaataacaaaagtacttaaaagtgaaatagccattataactgtaaaacttctgattatagttatatttttaattgattcttttgaaaagatactttgaaaaaaactactcttggaatatttatttttaaacgctttagtatttttattggaaatctttgctttttctaacattttattcattctcacatcacccttaaattattatcactaaaaccacatttaatcttcgattttagtataagtctgcttctttagtttaaattaacatttcatttttattttcaactaagcacaaggaattaatcctatgtcttattagatatatttttacctttagccctttactcctccaattgtcaatccaccaattatcttctttgataagaatgcaaatgctatcattattggaacaaccgaaattccaatacatgtatatattgcaccaaattcagtcttgtaaacaccttttgcaacaacctgcataattggaagtgtatacttatccatatctgatattagaataagaggtgttaaatagttattccaagttcctataaatgtaaatatagacatagttgcaacagaaggcataataagaggtaatcctattttgttaaatatagcaaattcaccagaaccatctattcttgctgcttcaatcaatgattcatgaaccgcaccatctgtataacctttaataaagaaaacagaactcgcattagctattgaaggaattattaaaggaatatagctgttaagcaaatgcattttgcttattaattgataaaatcctatgaatcctaactgcataggaatcatcattgaacctaatacaattgcgtaaagcattttattacccttaaatttatatcttgaaaatccatatgcagttagagcactaaaatatccacttactactgtaacagcaactgcaatgaataaactgtttccaaatcctttccatataggaacactttctattaacctatggtaattatctaataatgctgttcctggtaaaatccacaattttgatgctatttcaccattggtatgggtagcatctattaacattatataaaagggtactaaacatattagagtaagtataattaataagatgtaccaaaccgctgatttactatttgtcttcatactattagtttttttaactttttcttccatgtaatatcacccacccctaatcattctcaacatttctattaataaacttgaaagttattatagaaaatatgagtatcaatataaataaaccatatccaatagcagaaccatatccatagtttgaattctggaaagcagtgttatataaatacataactactgtcaaggtcttattattaggtcctccttgaccaccagtcataacataaggaatatcaaatgtctgcataccaccgataagtgatgttatagcagcatataatacagttggttttaacattggaattgttatgctcttgaaactctgccaaggagttgctccatctatgcttgcagactcatataattctgctggtatattattcaaacctgctccaaaaattatcgtactatatccaaaccacatccaccatgatataagtgacattattcctctagaaaaatattcactcaaaagccagttaacaggtttgttaatcacatgcaaatctaaaagaatcttgttaattgcaccagtttgccagtcaaataggaatacaaatagcactgctactgctgctggtgtaataaggttaggaagatacatagctgctctaaaaaattcttttcccttaatcttttttgcactattaaacattactgcaagtaaaagcgcaaaaaccatctgtggaattacagcgcaaatccacattatgaatgtatttgctatagcctgataaaataaagcatcatgtataagcgtaacatagttcttaattcctacaaatgccggatttagtgacattccatcccacttttcaagacttataattaaagtatatataacagggtataatgaaaataataagaatataacaaaatatggaataacaaagtatattccatattttcctttatctactttgttttttttctttggcatcaaaccgcctcctaatttaaattacttattaggcacatgaaagaaaataattgaccaaagatgcgacgcatattttgcgtcagacaaggaagtgaattctgctcatagcgggcttattagtagaatttactgacacagtatgacgtaaaataggctagcatactgatccattattttcttgattgtgccttagctgtttaaaatataataaacagctaataagttcttataaggttactctacagttatatctgggaatgcagccttaatatctgctttaaattgttgtaaaaattcttcttttgttttttctccagttacatataagtctaaatcagcttgaaatttactattgatagtttcatcgtacttagtaactaacttaccagtgatagatggaactatctcactatatgtcttagctaaattttgtccaccagcaaaagcattttttccatcatcggtagttgcaaattgcttacttacgtctgtcatagatgagaaatcaccatttgttttcatatcccatgtttggaattctttagaattgaagaacttaacaaattgccatgcaagttccttcttttcactcttagcgtagatacctaaccaagtaccaccattgtagtaagctgctggtgctttagcaactccccaatctccctttgtgtctttagcattagtagctattacatatggtaatccccaagttggaagtgcataagctaatacgtttgtcccatctactgcaccagccattgatgctgaccatggtgctgaccatgtattaaacttagcgtctatacctgcatctctgattttttttgcattatcagcatattccatcatcttatcatcgatgactagtttattgtcttctacccagccatgtgatctactaccagttgcaataacaaatccttcggaataatttggaagtagcttaactgtaccaccacttttttcgtttaattctttaccagttgcaattaatgaatcccatgtactaaatttcttagaaatttcgtctggatcatctgttccaagatattgtttagctacacttctcttgtagaacaatccacctggagttgcttgccaagaaagtgctctaatgctcttatcttccgcatttcttccaagatctacaacatatggagcctcagtttttgcaatttcttctgcattatatggagcttgtgaaagattttcatagtaatcagtattaacatatttatttacatttgcgacttctgaagtgaaaacatcaggtacacctgatcctgaagctaatactgatgaaagttttgttgagtatgcattattatcagtcggtataactgtcaacttaacctcaatgtttggatatacttcgttaaatttttctataaagtgtgatgattgaaattcatctgtaaaggaccacatatttattgttcctttgtaatcctttggatccttatctgtaaaagtggttggttttgattcatttgcactttttgagctgccgcaacctgtaaaaacagacccaacaattgcaactgacattgcaaatattaatgctttttttaaataattttttttcatattctatttcccccttaatattaatttctactaaatacataccctaacaaaattagtttgtttttagaactcacttccagaaaccagtttcgataacttataaaaaaaatatttattaatattttttcttaatacaataattgaaaaccgatttcgaaaatttatacatttaatttctcatttccctcctcaactcttattacaatacttatgatatattaaaataacgtttacttgaacggtataaaattacgataaagtatgaaaaaattactcacttaaacatttacataaaaattcaatgagtaaatttcaaaaataatttcttgaggcttttattccatataacactccagtcaaccaaaaaagagactctttacagaatctcttaaatttgtatactacatatttttgttttctagtctattcacttaaatattatttacttaatacaatatctatttttattaaactggatcgtaagacacccagtcgtaatttgcataaagtggagttttaccatcataagcatttagccatgaatctacgcctgttccagaccataaattcatcataattttacctggatgtgatggaatactattggttgtcctataaacttcctttccatctaccaaccatgcaatataagttggttgccaattaaaagcataagtatgataacttgctgaagcatcaaatcctaaattataaatgtgctcgtggttacctacaccatttgtaaaataattgaattgtacttttgtagtatctttacctaaaaattctatatcgatttcatcccaaggagtgccatctgttggacctgtgtacgtaaaaaatgaagaaactataccattattttttgctggtttcatatttacttgatataaaccataaccgtaagtatcattagagcgatattctccaccagcatatggctttgtgcctccttcagtatctttattaagagtaagagccatagttccattactaaaattaacattaccagctctccaagtacaattaaacatgccgccatttgtccatccatctgattttgaccaagctgatgtattagcataatcaaaactctcacccatgtgtgttttagttaatgcggaagcttgtgttggtattagtgtgcctactaaaaaagttcccaataacattcctaatgctgcagtttttaattttcttttattcatatatatacctcctaaattcttattacttctttatgatatattaaaagagaacttactagaatcatataatattacaataatatatcaaaaaattacccaatttaaacatttacacaaaaaaacaaaaagagactctttatatagaatctctttttgcttttatatgatattttttttatactcagctggagtataaccagtatgttttttaaaaagtttactaaagtatgaagtctccttataccctaacaagtcactaacctcgtaaactttatagtcatatttctttaataatatttttgctctctccatctttgcttttgttgcatactctaaaaagttttctccagtttgctgcttaaatattgaacataaataattcttacttatatttagattactagctatagatgtcagcgttatatcctcatctatatgattaagcacatattcgcaagctctttggactatgttatcgctctggtttagactatattcttttataatttctataagtttagctatattatctatcagtttattttctatatcttctagagtttcaacacctaaaaatcctattttaactattttacttaagtcatatacatcttctagaaaactatattttttaagtacgttattataaatattatatataatttgtgtaaatgtaatatttatcttaaaaatatcaaaattcaacatctctgctatttcttttaataactctttaagcatgcctaatgaatcatcttttccaacaattattgagcttattaatgccttttctttctcaatcggataaacaaaacgatcctgcctgcattcagctaattcacttacattgattagcctatttgtacctagaacatatttatatttaagtgcttccttagcatttaaataacttttgtaaatgctatatatttgattataggcgcttccaactcctatatttaattttgttcttaattcttcattacccactttaagtatattatttaatacacttataaaactttgatttaaatctgatatttcactctctttatcagcttgtacaataataattttttttccaaaatctgaatctactaaggaaaaatattttatctcgcatttttctaatacttttcttattaactcattaaccatatcatttaaatggttccattcatcattttcagttaaatcctcactgctaataatgatttcattaatttcaacaattgcaacttgaactttaccttttataagaggaaggttatactgcgaaatatactcatccatcatcatcaaattttttcctcttaaaaggtcatataatattttctctccagatataactttatttacattatattcacgatccttttcttgcttcgttgttagtttattactagcattgattaaaatattctttagtttttgagagtctattggcttcaatatataatcaaaggcacctaatcttataccttcctgtgcgtatgaaaattcatcatatccacttaataataacactaaagtatccaatcccatttccctaatttctcttaatagctcaattcctgttactttgtgcattttaatatctgatacaataaaatctatactatgctccttaatcagttcaagcgcatcttccccatcccgagcttcgcaaactaccttaaaaccatagtcctcccagttgattatcttttttaatccctttcttataattggttcatcgtctactatcattactgaatacaaatttatccccccataaaacctttcttttatttattccactctgctttatcaacatttttaaatggtacatccccatctatattaggaagcttaagagtaatttgagtgtaatgatcttctttagattcaatcataacaccatatggttttccataaaaaagttttattctgtcacttacgtttttaagtccaagaccatatcttttgtctgtatttccatttacatggttctgaatttcctgcactttgtttatgttcattccgtttccatcatcccttacatttaagtacaaatattctttatctacattaacggatatagaaatataaccattttcattcattaattttttcgacagaccatgcttcaccgcattttctactaacggctgaattgacaattttaatatttctctatttaaaaattcttcatcaatgtcaacatttaaaattatttcaaaatcatatctaagggtcattaatgttatataatttttaatatggcttatttcttcacttaatggtacaaactcattattccacttcatattatacctcatcatatctcctaaagaggccaaacaatcagataccatataattttcttcaactagtgccatcattctaatattctccagagtattatataaaaagtgagagtctatttgagttttcaatgcctttaactctgcttctttagttattatttccttacttatactatccttaatgagtgtatctattgttttcatcatctgtctgaagttatgagcaagtactcccacttcatcattaccgtatacatctatgcttggcattagatccccagttctcacttgcttaacagcagaaattattttatacaatcttttaagaatagttttagttgcataatatataactacagataagaaaatcaataaaaaaagtgagcccccaataactacatacttagaattttttatttcccgtgaagtattacttaatggtatgatatttagtaaataattattggggattggtgactcttcatagagtataatataatcttcatttccttggttataagtaagttctccattttcatgttctaatttaccatcaataaattcttcaaatctacttttatcaaatttaaaatttctaagtaacgaactattctcatctgtttttatattcatattttccttgtcaactaacagtatttgtccactttttaattcatccttttcaaacattttcggaaaaaaatctttagatctcattgtaactctgctgattcctaaatatttatcatttggataactaattttcttattaatagaaacaactaaatctttagattcttcattaagagtagaatcaactaatatatcattatcataatgattaacattccaatactcagctccatttttctcaaaagctttttcataccatccatctttaacaactctattttctttataaaatgtaggccaaatttcacttacttgtggattgctagtaaataaatttatttgcttaattgttggattattattttgcagattaattagttgtttatacgttgtttctctaaaatcaattagtgcttttgcttcttgattattatcaccttgtaaatatcctataaccccactatcagattttatagaattaactatattccgcattatataaacattcttttcaatgctgtcatattccgtactaagatcatattctccccggctaactgcatcatgtttagctttagctgaaagagaactaaatatatagagagaaaatattaatattggtatacctataataaatatgtacatagtgattagttttttcattaaactttcgccaagaaatctttgcttaacttttccaaagaaaatcacaatattatttttcatttaagcaactcctattttaattcatcttaacacattaagttttttcttattctcttcatatttttgctgagcatatttttgcagcttatcccagccttgctcttttctatatataataaattcatttaatatactattaaactcctcttcattcttagctataagtaattttttcaaagtacttccccactttgtacttattctagaaaaagccactccttcttcactatcatcatacgtataaacgttatcaaataaagaataattataggtctttccccttgcccaatcacttatcatttttattgcttcctcattatcaggtgtccatttctgtactaagtccccatcttctaacatccaataagtacttgctgcaccatatttattatcaaaagctattctatccttatttagtaaatccacaacttctggcttaaactgttcctttccattaattacatcccaagttgaaccttttatccctaaatacaaatccttatttccctcttcactaattagatagcttaaaaatctcatagccctcattggatccttgcatgattttgaaattagtgtaactgtccaccctgaaatgctgtctcctgctaatttaggtggatcaagcttagaatttaaaggtccatcaatagctatatatgctttatttttatctctagaatataattccagctgttgagcagacatatcggaactttggtaaagcattgcgaaatatcttccctctgttatcttttcttctatctgagctcttttatcaacaaaaatttcctttgataataatcctttctcattagccattctcaatgttcttagccaccttatatattcgttatctgtatctttgtcatataccataccattctcttcacgaggaacagctaaaaagtttggtaaaatactatctaaagaaagatttccagattcattaaattcatgtaatcctaaaggtataagctcttgaccatcagacatatggaattcttttttagccctttcaagtgcattcaaaaacccctcaggcgttctcatatctggtttacctaaggcctcataaatatcttttctaactaaaaatgcttgattagatggtttttcttctttaaagttgttaaaatcagtcaccggactagaaaaattaggatagcaataaatatgcccatcaccttccctgtaccactccaatttttgtttatctgcaactttcataaaatatgcatcatattgttctgatagtttatcaagaggtagagccaaaccattttgtatgatcttcttgtatccatcactttgggcacttaatgtaataaagtctggtaatttaccagtttcaatcatggaatttaatttttctgtttcatcaccacttggagttatcaagtttaaactaacaccagttttatctgtaacgtattttgaaacaggattgatgccccacttagtttgaaaccatgaaaagtcaatataccagtcaaatactattggtgttgtatctgacttccaattttcttcactatagttattatttactttattatctactcctttatcaaataaaccgtatgttgtaaaaaacataaaaactacagttaaaattataatccctttcccaacctttaaacttagcattttcataagtaatcccccctttaatactaagaaattctactaaatacatttatacaattaattcattgtgcatttgctatattttcattttattttgaactctttttataaatccatataggttgtatcagacaaaaaatcacaatcatctttactataattagtgtatattggtaaataacagcaagtattaacattaatagtttagcatatagtaaatgtaactgtaaatatagcttaaaatacatggtatcagcattaagatattattttaagcctaaaatacatatgagtgaattctattaagctcttttcgattataatcaaatcttaaatatgtatgttttcaaaaattgtgtcaataattaaaatatgatttcctattttcaataaataaagagatagcattattatcattaacctgatatttctgctatctctttctattttactaaaagaactagttaaattaatttacatatatctttattgtgaaagttcattttgaaaatcacaagaagcaacaaccttatatcctaatgatcttagattttccagcaagattattactcctgtaatatactgttcttcctttataccttctccaggctcaataccaagataatattttgagtatagaaaaccgtcttcttctttaacgcttttttcttcactaaaatcttcattatttatcaattctattttcattaaatctgagatgattgtccatctttttttactacccattgttattttttcaattaaactcaatataacttcttcttcttcatcagtgttgatgaaaattttacagtacgaacttctatatttactcatattatcactccctcataacaaaatattatctaatatgtactcaatacaagtatacattaatagatagaatccgtaaatattttgaaataaggctctaattatccataaaaatcttatcattatccaacgtttcataacactatcatgtttcgataatatttccgtcaaatttgaatcctaatattattaacattacaaataattacattgaaataaactcaaaagatgctaaaatacaaataaatacttagcatatatgactacaaaatcggatatttatcttattgcttcaatataaattcttagagaataaaaagatttttgtatatttccaatatgaatatggggaaatatatatatgatatgaattacaagtttattaatcttaaggaggtatacatgacagaagctttaatgaaaaggccaaaacttaatgccgttcaagtgcttgcagtaggctttgtgctagttatttcaattggtgcggtcctacttagtttaccaatttcatcagcaaataacgaatatactaattttctagattcactatttacatcaacctcagctgtatgcgtcacaggacttgtaactttagatacaggtacttattggagtaattttggtaagacagtaataatgcttttaattgaaactggtggacttggattcatgtcttttactgtttttatagcaataattttagggaaaaaaattactcttaaagatagacttataatgcaggaatcaatgaacacttttagcatacaggggcttgtaaagatggttaaatatatttttgggttcacaataattatacaaagcctaggcgcagtattattgtcaacacaatttatacaacagtttggattaaaagtcggaatattctacagcatattccattcaatatctgcattttgtaatgctggctttgatttatttggaaattatactagtttagttagttattctagcaaccctattgttttattaactataagtgcacttataattattggtgggcttggatttaccgtttcactcgaaatatataattataaaaaaaacagaaaactttcgattcattcaaaaattgtactttacataacagtagctttaattatttttggttttttacttatattttttattgagtatgaaaatcaaaaaactcttggagccatgaattttagagataaagttcttaatgctttttttgcttctgttaccccaagaactgcaggattcaatagtatttcaactgatggaatgactatggctggtaaatttataactattatattaatgtttattggcggcgcgtctggttcaacagctggaggacttaaggtaactacttttggtgtacttctatttactttagtgtcagtgctaaatggaagagaagacactgaagcatttggcagaagattttccaagggaactgtatataaagcttttactctattatctattgctacgatattagtgttaatagtaactataattcttactattacggaaccaaaggaacttttcataaatttactgtatgaagctacatcagcttttgcaactgttggactgactactggagttactcaaaatataggttctatttctaaagtaactcttattataactatgtatcttggcagagttggtcctttaacagtcctattagctgttattaataaaaagaaaaaaaataaacttaaatatcctgaaggaaaaatattaattggataggaggtcataacttgaaaaataagcattttgttataattggacttggaagatttggcacttcaatagctacaacattatataatttaggtcaacatgtattggctattgatattaatgaagatagaattcaagaaatcgcagataatgttactcatgctattcaattggatgcaaccgatgaaaatgtattaaaaactttaggtcttagaaactttgatgtagcaatagtaacaattggaactaatattcaagctagtactatggtaaccctattagttaaagaaatgggagttaaatatatagttggaaaagctactagtgacttacatgctaagattctatataagatcggggcagatagagttattttacctgaacaagatatgggaattagagtagctcatcatttggtatcctctaatatactagactatatagagctgccttcagactatagcatgatagagcttgaaccactggatgaatggcttaacaaatctataagagatattgagataagaggtaaatacggtataaatatagttgcaataaaaaatgacaaaagcatagatgtttctccttctgcaaattatattattaaacgtaccgatattttagtagctcttggctccaataaagacctaaataagtttgaaaccttgattggtaaaaaaaattaatttttatgtttatttaaaatagaaacaatttaagtgaaacaatagcttccattttgtaataaagaatcttatctgaagcttaagtttcactttattttaatgtaatttaatttgtaatcttctcctctttatagttatcctttaagtttattaatttaaaaattattgcaccaaatatagcagataagattgaaacaatcataacactcatcttagccaaagataatgtcccttcatcagtaaatgataaagaagatataaataacgacatcgtgaatccaatgcctgcaagaatactcgcaccatataaatgtcttttagtcacattagatggtaactcagccaactttaattttactaaaatataggaaattccaaatattccaacttgtttaccaacaaaaagcccagctataattcctatactaactggtgagaatattatatttgataaactatccgtactaatcaccacaccagaatttgcaatagagaatatcggcataataataaagcttgatataggtgttaacgcatgttcaaatttatataaaactgatgttttaaactcgttaacattttttcccgtaggtaatgctatcccaagtaaaactccagcaattgttgcatgtatacctgatttcaaaataaaaatccataaggctaaccccataataatgtaaaatgatttatgtttaacttgtaatttattagctattaaaagtattgcaaaaactatcaagcctatggcaagtgaaagccatgaaatttgattgctatagaatattgctattactataatagctcctagatcatcaactattgctaacgctgtaagaaaaactactattccttttggtgcatttttagctactaaagaaagaatccctaacgcaaatgcaatgtctgttgccattggtattccccatccggaaattgtcactgctttataattaactaaagcgtatataattgctggtacaatcatccctcctactgccgctgatattggaagtattgtcttattaaaagatttaagttctccaaacacaacttcactctttatctccataccaacaactaagaagaatatagccattaatccatcattaatccaatgaagaactgacatcgacaaagaaagattcatatatcctatggttatataagtatgtaatgtattctcatatactgacgcaaatatagaatttgcaattatcatagccaaaagtgcagaaattaataatattatgccacttgaagattcatttttaaaaaagtatataaatggatttaaaattttattcttcatacttgcttttccacctttctatcttatatataacctaaaacgaaaacttaatgcattaatatttaatgcatcaatatgcaaggcatgttcctaattataaaaaagatgagaatactctaaactagagcttcccacctcctaaactaattgattgaatataaataataatatcttagatatgcaaaacagttaaactataaaatttaacatttttattctttatctctaacaaataataatttataaatttgaactataataagtgggataactgatagtccataaatataactaaattccattgaatttaatgcactaacttcaaagattccacttaaaggtctaaaagtcagaactaatagtaatagcaaatagccaattattgctgcaatccatatagttttgtttgtaaataatcctattttaaaaatcgattctttagatctacaattaaatccatgaagcagccttgataaacataaagttgcaaaagccattgtacttgcaacctcagcaccacctgtatataatcctatgtgaaaagccgccatagtaactattgcaatgagtaatccttccattataacttcaattgcaaaagatttattaagtattggaacatttatatttcttggtttttctttcattatgttctcattatgaggctcaagtcctattgctattgctggtaagctatctgtaaccaaattaataaacaataggtgaactgctgcaaaaggtattggtaatgctcctattgacgcatacaatactgataatattcctgcagtattacctgataagagaaatttaattgaatttttaatatttgcatatatgcttctcccgtttgagatggattttactatagttgaaaaattgtcatcagcaagtacaattgaagcagcatctttagcaacttctgtccccgttattcccattgcaattcctatatccgcctgctttaaagctggggcatcatttacaccatctccggtcattgcaacaatatttcctttttcctgccatgctcttactattctgattttatgttctggagatactctagcataaactgaaatcttatctactttgttttttaactcttcatcactaattttctccaattcaaagccttccattgcctctgattcatctttaagtattcctatttgcttagctatagcagatgcagtaattttatgatcaccagttatcattacaggttttattcctgctttaatgcatttttcaacagcttctttcgattcatttcttggtgggtccatcatcgctataagaccaacaaatattaaatcatattcatcttcaagagtaatttcttttccttctgaaatctccttataagcaaaagacaaaactctaagcccatccattgaaaattttctatttatctcttcaatttcttttttgtgctcttctgtaaaatccattattccttctgaagtttcaacttttactgttcttgataaaagtacatctaatgcacctttagttaacattatgtatttatcattaaactggtgaatagtactcattaattttctatctgaatcaaaaggtacttctccaagtcttggatattgatctcttatgatcaattcatctagttcatatatttcacctagattaactaatgcaacttcagttggatcaccaatttccttattttctactgtaacagcatcattacacaataatgccattaaaactaaatttttctctaaagtcttatcatgatccaagctatcatgatcaagtatcttcccatctacaaaaactttctgaactgtcattttgttttgtgttaacgtccctgttttatctgaacatataaccgatatacttccaagactttcaactgcatgaagttttcttacaatagcatttttcttagccatcttttgagttccaagtgcaagaacaattgttactattgaacttagcgcttctggtatagctgccaccgctaaagatactgcaaacataaaggaatctataatattacgtcctctaaatatatctaaaccaaaaataattgctgaaattattaaaatgacaaaagcaagttttttaccgaagttatctaaaccaacttgaagcggtgttttcttttcctttgcactttctaacaagttcgctattttcccaatttcggtattcatccctatacttgtaactaaaacaactcctcttccgtaagttacaaagcttccggaaaataccatgttttttctgtcaccaatagatacatcatctttatttattacatctataaattttaaaacactttctgactcacctgttaaagaactctcattcacttgaagactaaaactttcaagaattctaccatctgcactaacataatctccagcatcaagatataaaatatctcctactaaaagttctcttgaaggaatctcaagcttttgattatttctaaaaacctttgctacaggtgatgaaagggccttaagtccctttaatgattgttctgctttaatatgttgtattgtgccaagtattgcattgataataactacaaccattataacaatagtactttcaagctttcctagaaaagctgaaatgattgctgctactaataatataattactaaaaagtccttgaactgctcaagaaaaacctgaaatggacttttccttgctgcttcctctaattcattaaaaccatattcctctcgtctttttgtaatttcttcatcatttaagccattgctagtaactcccaacatttccagtgactcctctggtgttttctcataataccctctcataaactgtcctccttaaacttcaaatatttttcgttttttcattatttatataggcttccttctaattatttgattttctatttattaatttattataaattaataaaaatatactaaaaaaaataataataaaaacaaaaaatattacattattcattcatcatatgaacttactctaattataacttataagatatcatgttaaaacaattataaagttacaaattactacacgtgcaataaagtaaaggcatttactttcaaagtttgccacttactttattctataagcaacccatctagaaagccttcctataacttcaaaggaaacaatactacacaccaactcagttagctttccaaacttcctataaagcaaattaaaagctaaaaatggaatccattgttttttagatttaggaagtctcttaattatgttcttaagcgtatacacttctttatatatccatagatagccatcatataattcttctgctgtcatattctttggtttgtatacaacatgggaagtattataattagatagattatgatctactattctattttcctttaataatgatgagtataactttgtgccaggataaggagtcattatatgagacgttactgtctctattttatttttaactatccactctaatgtactcttaaatatttctgcatcatcttcatctaatccaaaaacaaagcttgcatttatcattatccctcttttatgaatttcatcaacaagcttctcatatctgcttacactattttgaattttatgtacgctctctattgacttgctatttatactttcaaaacctatgaaaaggctttggcatcctgcttctttcatctcatctaatagttcaggcatgtccactatattagaagtaacagctgcattccatttcaactttagaggttttatttcttttaataattccttagtccatttaggatttccaataaaattatcatcaataaacataatatgttttgtttttagtactttaatgtctttaattacatcttctataggcctattaatataggtttttatagacttagcgcagctattataacaaaaatcacatttaaaagggcatcccctgcttgtactgattatattagtatataaatatttcttattatctatcatgccatagtcaggggacactatttcatttcctcgaatgttttccatatcataatatatctttttaattgaattattttctacatccttaagaactttctcccaaactctctcagccattcctataattattgcatcaaagctgtttgctgctccttctggatctgccgttatatgtattcctcctgcaattacttttactccacgtttttgaaattcctttgatatttctactgccctattcataacgtctacagtaacagttattgcaactaaatcaacgttttcatcaaaatctatattctcaacattttcattttcaataataacctcatgttctttaggcgtaaggtttgctattgtcagtaaagctaatgaaggagacattctcgtctttaattttgtatccataggccttggcatcattgcaggttgaattaacttaatcttcatattgcctcctcaagtaaaatccacttaacacttaactaatttattactatggcgtcttttttcaaaaatattagcaaatactgcactaatactagttgacaaaataactattaatgcaaataatatgattcctggagcgtcgtctccatctgctatgataaatagaagtggcatggctatcacatataaaagactgattgtaattccacagtatcttatattcttcaaagtctttacagataattccgacaaggcttcattcttattagcatagcttatgaattttatggtctgataaagtgcaaataagaatggcggcaccgccccatacagtccgataaaaccaagatattgcaaatatgctgacaccgaaattactcgcgataatcctgttgttaccataggcaacaaaaatataagtaaagcaacaattggacctccaataaaaacagatacctttaataaaattgttgaacttcgtttcataaaaatccctcctatattaattattatttgtacaaaaccattaattattttgcttaacttttgatttttatatatcatttttgtattctaaaatatcacccggttggcaatctagagctttgcatattgcctctaaagttgagaatctaatagcttttgctttaccatttttgagtatagaaagatttgccattgttattccaactttctcagtaagctcggtcacactcattttccttttagctagcataacatcaatattaattataatcgccatattattttcctcctgtattcttcattctgtacattaagattattgatttttacgccttacactgttaaatcattttctgattttatgtctatggcttcttttaagagcctttgaagaacagcagagaaaactgcgattaccaatgaagcaaagataggtatcattccaattattattaaacctggagcatcgtctttctctgctaacaagtaaacaaatggaattaccatcacatataatgcagatattataactgcacagtattttatattctttaaagcctttacagataactcagaaaacgctatgtttttatcaatataccctaaaagctttaaagcctgatacaatgcaacaaagaacggaacaactgatacaaacatccctattaaaattggatatatcatacttgcatagtctggattcactggattattagttaactgaactgctccaaatatgcataaagcaagaactggaactccaataagaataacagctatctttaaaaaaatcgttgaatatcgtttcataaaaagcacctcacttttaaattctatatataagatatcacaccttttatcgtttatcaataaatttttattatatttcatatattatttatttttatgcaagaatatattgattaattgtgttagtttaaaaacgagatgaaaaatcctgatagcagatctggacacaaaaaagaactaaatactttgtgaatgctttgccttctgtgcaatcataaaaaaaagtgctatatctcatgatatttagcactttttctataacatcttctcatttatatataaattatttctactcccgaaaaactaacatctccaactaatgttaatgtatttgtcgatctctcatttttcctatttttttcatcaacagaacctaaaaatacattagtcttattatcaaccttccaagttcttggtatatataactctactcctgaaaaagaagcattaactcttactatagcattttcgctactcataactgcattatcaaaatacaccttcatagctccaaatgagcagttaagatcagcttgttcaaattcatttgtatttatatatttaatacaagctccaaatgaatttctaaatataatattgccttcatcttctatgtcaattttttcgaatttataatcctcatgaacatgattatgatgaatccagttaacatttttatgaaaaatcatggaaaggccgatgctgccaaatagtgctgccataagcacagtccaaggggtaatagctgtaattcctaattgtctagcatagattatacaaataaatgcaattggaaatagaatacctgaaaagttaagatgaggtatactttttgctatgatcactactaaaaaaactgttaatattaaactaaatgcatttatatctgggaagtatccaagtttacttataaccataaagatccctgctagtataaataaaattccccagaagactctttcttttttcatcattatttcctcttttctaataatttaatttttaatggcttgtaataatatcttgagacatacacctgtttgtgagtattttgaaattcaactctgcttgatgatgatatactttttgttatggagtaaatatgatttgtatttagtattgttgattttgaaactctcataaaatatcctggcaataattcctcgagttcatatagcttatactttacgttatatatattatcaatggtatgtgcacaaataccgctttcttcagtttcaaaaaacaaaatttcttccagtgaaagataatactctgtttctcctttgtaaaaggttatatgctttttttgcgatagcagctcaccaagcacaatttgaatatttctaacatcttcatttaattcattacatttaataataacttcattttctttaatttcattatcaagttcaacccgtattttcatattttcactccccacatctttattatatttgctgacttttacgttgtaaacacgatagcagtaagtggttagttatcacttgtaagtggtatatttttatatactttgttcatgatctttgatttttctaaagctttacttattatttatctagaataatctttagaaaaaataactcttttatactttttcttcttaattttcataaaaactatcgtttagggaattctatattaagagaatttaaagagaaaggaagattataatgactccaattacaataggtgcagatgcaccagattttaaagcaaaggataataaaaaacaggatataacgttatctgattataaaggaaaaaaagtacttctttcttggcatcctctagcttggacaccagtatgtacagatcaaatgcgagcattagaaactaattttgaaaaatttcaaaatcttaacactgttccactaggattcagtgtagattctcaaccttgcaaagaagcatgggcaaccgttctccaaattaaaaatgttagtcttccatcagatttttggcctcatggtaagatagcttctgactatggaatatttgatgaaactactggtatatcaggacgtgccaacataatcataaatgaagatggtaaagtacaatggataaaagtttacccatcagaacaacttccagatataaatgaagttttacaggttttatctaataaccaataacatgttaatggactgattaaatgacttgcttatgatttaataattttgtaattgcatttataattcatgcttagcatattttctaagcatgaattataaaattgcacatactaaaaaatccaaggccagtgaaccttggattttcataatataaattatctataaactttttaatgaaaaaatcaactttacttaaaattatttatctttgtctaaattacgccaattaccatcatatccattgctatcaagccacttataagtttttactatttcattattctttatttgatatattgaaagtcctccttgatgtggcacgcaatatacatttttagttgtcttaccaaccatgtatccacagtattcatcattataagagcctgtaaggctaaacacatatacatcctctactggtagattccatttatcattagctatgaacttattaatattcccttcaaaatatctttttgtaagcttagcgccatatgcagcattcatttttgaaatataattactgtcttcttttaatattaaatttcttgcttcttcagcttccttagatggtttaatccaagttccatcttcatctaattcatatccatcaattacagtaccatgtgccatagctccatcttgataaaaataatgccaagtctcataataattatcttgcacccatccagttttcatatatccatttgaatcaaaataatacgtctttccattaatgtctctccatcccttagcatatgaatttccttctgagtaccaccatccactattatcttgtctccattcagcactggctccgattgggcttaaaactaatactgaaattactactaacgcaccagatattaactttctcattttatttcccccatatttatttataacatgattttatgttatttatatttataaaatactactaattatattttatgaatatagagtgaaatttatgagcttaaactggttattaagataattatcgttgctttattttgatttcattatgcattcctctatgattggcattattgcagcatattctagtattcttcagagtataaattctaatattctgaagaatatttattttttgagacacatatatctgttacaattcacaatgcacatttcacaattacggctaaaattcttgcaatatttttaagattataataaagaattatttttgcaatgtatatattgtaaaaatttttataataaaactttctaagctttaaacgttaaccggctcgtctatttggattgagtttagaattttcataaattcatcacccattatggtttctttgaaaataagatgcgatgatattttgcccaaagcttccatattagcctctagaagattttttgccttttcgtaggattcattgattatattcataacctcacgatcaacttcagcagatatttcatctgaacaatttcttactggtctgccgtcaagatatctgttttgaattgattcaagccctatcataccaaatttttctgacattccatacattgttaccatttgtcttgcaatactagtagctctctcaatatcatttgaagcacctgtagttatttcattaaacacaagatcttcagctgctcttcctgcaagcagaacaactatctgttctagcaattcatctttagacataaggtacttttcttcttctggcatctgcatagtatatccaagtgctcccattgttcttggaacaattgtaatcttatgcactggctgagtctttttctgaagcgctgaagctaacgcatgtccaacttcatgaaatgcaacaagacttttctcattctcagtcattactctatcctttttctctttacctgcaattacagtttcgactgcttcaaataaatcatcctgcctaacctcatctcttcccattcttacagctcttaaagcagcttcattaaccatgtttgcaagatcagccccaacagcaccagcagtagcaagtgctatctcttttagattaacactttcatccattattatattctttgaatgaacctttaatatattttcccttcctttaagatctggtttatctactataactctacgatcaaaacgtccaggtcttaatagcgccttatcaagaacttctggtctattggttgctgctagaataacaactccctttgaagaatcgaagccatccatttcagcaagtaactggtttaatgtctgctctctttcatcatttccacttatattaccttctctactcttacctattgcatcaatttcatcaataaaaataatacatggtgcttgcttttcagcttgagcaaataaatctctgactcttgaagctccaacacctacaaacatctctacaaaacctgacccagaaagtgagaaaaatggaacttttgcttctcctgctacagcctttgcaagtaatgtcttacctgtacctggaggtcctactaaaagtgcgcccttaggtagtttagcccctatcttcgtatatctttcaggtttgtgaagaaaatcaactatctccttaagagattctttagcttcttcctgacctgctacgtctttaaaatatactcctgtggtcttttcaacatataccttcgcattactttttccgacggacataaatcctcctccgcctcctccaattttattacttaaagacttcatgaaccaattacctaacatataaaatatagcaaaaggtataatccatgaaagtatgaaaccgataattggagactgagtattttttacgggtgtagtaaactttacatctgcattatatagtttgtctacaagttgaggatagtctaagttgccagtataatataattttttatttacaactgaagcatcctcatcactttttggtgttataacaagcttgtcactataaatctcaactgattctacttgtttattatttaccattgtaagaaattcactataatcaatttgtttatgatttgactgagaaatcaaatttataactatatttattactaatgtaattataagcgctactataatgtatttcggtaactcctttttatcaggcaatccttttttattaggcgacccttttctatttttaaacattaactttcctcctttaatattagaaaattacattcttaactaaatagcctgtattgtatgactttaatacgctccatgcatgataatctattattctctatcactgcttcccatgaataaaaatataaggtgaagcaaacttgcaatagcagttattgcagaagcaacataagtcatagctgctgcatttagcacccttttcgcaggagctatttcattgaaacttagtatcccttgtgattctaattctaatattgctcttttacttgcattaaattctactggtagagttataaaataaaatgctaccgctccagtaaaaaacactatacctagttgtgcaagcaaaggaatttgaaatattaatccaaaaatcgccatatatgggcctgccatagaacctatatttgcaattggtacaagtccacttcttaaagaaagtggtgcatattgtactttatgttgtattgcatgtcctgtttcatgggctgcaacacctattgctgcaacagaattgctgtaatatactgattcggataatctcactaccttttttccaggatcatagtgatctgttaaactacctgctatcggaactacagctacatcataaagtccatttctatcaagaattctccttgcaacatctgcaccagtaaatcctctagcattgccataattgctatatttgtcaaaggttccttttactttaaattgacaataaagtgaaaaagccaatgccggtaaaactaaaataatataataaatgtccatgtttatccctccaatatatttatttcatggttttaattaaacaaaaaagacctttgatctgattcagtaacaactaaatcgtatcaaaggtcttgctttccatttggagtatagaaccaggcagttttaattgccggttgttggctctatagcttataagctactcccctaagttatatgaagtatatcataccttattatatggtgtcaatacatattaattcacaaatttctattttgttttaattttcactacattccgacattttatgaatgtaactaattatttaggcactagagaaagtattcaatcataaataaataggctcatagttttataacactaattaatcacaatatatactattgaattattttattgatgcctcatagatttccttaattgattttgatattgtcccattaaattcttcttcagtttgctgagcagtgagcccttgggataaagctcttgaaaaactggcgattaatccatgattgcgtccgagtctttcgtttgcttctgcttgactataaccacctgacaaagctactactctgacaacatgtggctcatctattaaatcaatgtagaaattatctttagttggtattgaaagtttaagcatcacttttgtttctttatcaagttttgatagctgctctaaaatttcaagtttcaaaagtttttcagattcttccttatcggtactatggatgtcaacttctggctcaataataggaacaagacctgcttctacaatctgtttaccaatttcaaattgctgctcaactaacattttaattcctttagcatttgcttccttaataactgagcgcatttttgttccaaaaatatttttttctactgcttgctttaaaaggtcatctaagctacttattggtttcataagctgaacaccattgtcaatttcagttaagcctttatcaacctttaagaaagggacaatatttttttccttccaaaggtaatcaggtgtatattgattatcaatagtacgatacattgtgtcttcaaataatatagcacccaaaatatattctgaagtaaatgctggactctttattatgcgttttctcatttcatgtactaagtcaaacatttcgtcctcattagaataactgttttctttaatcccatactcgagtaatgcttttggagtactaccaccactttgatctaaagctgcaataaaccctttacctgtatgtattcggttcatttgattttcattcatctaattctcctccttctccttataattagattagaatcatgtcttactttttattatagtgtctttctctattaattatgcgtttgctaatatcataaatttaagtatagttctaataattattacttttagtatggtttttatattttatttactacgacatactcgaaaaccttgatctggagccttgccgcttgcatcatacttgcctctaaacgctgcttctccacaagtaacatcaccaatccagcctccgcctttagttactttcacagacacgctactaatatctaaacctttataccagtcccagcaccattctcttacattaccagacatatcatatagccctaattcattgggtttcttcataccaatagattttgttttgttattattattttgtatttcaggccaattccaatttcctgttaaatacttatctccagcatttctataatttatcgcttgataaattcgcgcaatataacatatatccatttgaatctaataatctcatgcagaaatattcacatcaaaattgaaataaattagtaatactcctaaaattttcatgtcacatttttttatatccaatcataaattgtattaaagttagttgagggaaacagttttaggctaatataaattttttgcttgtatgaaattatcctttataaattttttaagatcctattacaacttttactgtacgattttaagttaatatttagcttaaggaaaacttcttaacttgaactaaaacttttggattaaattaaaaataaggtttgtattttaaggaggcaataatatgttaaatcttaataacatttcagtaggaaactttgttagaattcaagatctttctgcaacaggtatgcttagagaaaggatgcttgctcttggacttacaagaggtgcaaaggttgaagtaataagaaaaggtccttctggagacccaactgtttataatatccgtggtgctatgatagctcttaggagcgaagaagcttctttaatacatgtcaatgaatgctaataattctgatatgtttcaagtcaaagcagcaggtataacctgctttttatatataaataatattattttaggaggccataatgggtttaacttttgaatcaacaaaaaacagctcaatgacagacatattcaaaatagaaaaaaaagaaggtcaatacattattgcacttgctggtaatcctaacactggaaaaagtactgtattcaattccttgacaggacttcatcaacatactgggaattggcctggcaaaacagtagtaaacgcacgaggtgaattcacttataatgatagagaaaatatattagtagatcttcctggaacttattcattattcgcatcatctgtagaggaagaagttgcgagggattttatttgttttggtaattcagacgctgtaatagttgttgctgatgcaacttgtttagagagaaatttgaatcttgtatatcaaatcatggaattaacacagaatgtaattctgtgcattaaccttattgatgaagccaaaaagaaaaacatagtaatagatggaaaaggaattgaaaaggaacttggaattcctgtaattttatgtgcagcaagaagcgagcaaggtatcagtgagttaaaagaagcagtatataaagttactacaggaaaacttaaaccatcaccaaaaactgtaatatatgatgattatatagaagaaaaaatcaaatttattgaacctctagttaagaaaaatattacaagcacaaattccagatggctttctcttagaattattgatggtgataaaaaattactagattccatatctaatagcatagacaacagctcattagaggaaatacttgatattgtaaacgaatcaaattctcatgacaaaaatagaaacattagggatgatatttccaaagaaatttataaacaagcagaaaaaataagagataaatatgtaacagaagataaaactaaaataaacagagatagaataattgataattacattacttctaagatatttggtatcccactaatgcttttgattttagctatagtattttggattacaataactggggctaatgtgccttctgatatgattgctaatgtactttttggctttgaagataagcttacactatggtttaatactatgaatgctccaaactggctccatggaatacttattcttggtctttataggaccttagcatgggttgtatctgtaatgcttcctcctatggcaatattctttcctatattcacaatacttgaagatttagggtatctaccacgagtagctttcaatttggaccatttatttaaaaaggcttgtgcacatggaaagcaatgcttaacaatgtgtatgggatttggctgtaatgcagccggaataatttcatgcagaataatagagtctccaagagagagactaatagcaattctgacaaataattttgttccttgtaatggaagatttccaactttaataactatagctacaatttttctagttgcaaagggtggaaacgagtttagttttttaccagcattatcaattacaggattggttattgtaggtatatctataactttattggtatcttatgtgttatccaagacaatattaaaaggagttccttctacttttactttggagcttccgccttatagagttcctaaaattggacgagttttatatacttcaataattgatagaactatatttgtactttggagagctgctgttgtggcagctccagctggcgcaataacctgggtacttgcaaatatatatattggagacctaagtattattgggcatgtctctgcttttcttaatccttttgcaaaccttctaggtcttgatggatttatattaatggcattcatacttggattacctgcaaatgaaatagtacttccaatacttatgatgtgctatttatcaacaggttctatggtcgaatttgatagtattgattctttaaggcaaatattattaagtcatggctggacttatcttacagctctaaacactatgttatttagcttactacattggccatgtgcaacaactcttttaactataaagaaggaaacaggtagcttaaaatggacggcaattgcggctctgcttcctactttcattgcaatacttgtatgctttatgacaagcacaatatttagatttttaggattagcttaatataattacttatatcagggctggaatctaaaacaatatggaacctatatgcatgattcttttgcaagtagctatgcatataggttccgtaaaaaacatttctaaccttttttagatttatttattaaaaactgttaaagtacttatacattattttattgtttagtataatttatactatatttacttttatctaaataatttatactattattacataacaaggaggtacaaatgaatactgttttatttgcttttggattaactctttttgccggtctatgcactggtataggcagtgcaattgctttctttactaagaaaacaaatactaagtttctatctataagtcttggattttctgctggggtaatgatttatgtttctatgatagagatattcttcaaagccaaagattctcttactaatgagctcgggttaaaaatgggttcctgggttactgtaatttcattttttggaggtattattttaatagcgcttattgataaactgattcctagcggtgaaaatccacatgatatatataaaattgaagatattaatgataatgataggcattcagatacgaaactcttaagaatgggattatttactgcattagctgttggaattcataattttccagaagggttagcaacttttatctctgcactacagaaaccttctatcgcaatacctattgctgtagctatagcaattcataatatacctgaaggaatagcaatatcagtacctgtttattacgctactggtgataggaaaaaagcattcttttattcattcttatctggtctttcagaaccaattggcgcacttgtgggttatttaatattgatgcctttcattaacgatttagtatttggtatactctttgcctctgttgcaggaataatggtatttatatctttagatgaattactcccttcagcaagagaatatggtgaacatcacctttcaatatatggcctcgttgctggtatggtggttatggcaataagcttgttattgtttatctaaatatatatggaactttattaaatctagcaagtacagagtaaccttgagatactctgtacttattaactcttgtttttcacatccctatatctattaaatttttccatcaattcaggatatttattaaagaaatttattaaatcaatcattccatataaaacattagtactaatagtatgttcaatcttttctgtttcttccaatatatcatcagatatatttagcaattttagaaattcttcgattaaatcatggcgttttagtaagtactttcctattttaactcccctgcttctaagaataattactccatacttttcatatttgattaaatttaagtttgctaatttttgaatcattttagtaaccgaagaaggttgtacatttaatgcggctgctagatcattaactcttataaaaccagttttatttgaaagcctatatatcatttccatataatcctcagctgatggggatagcaggcttttattctttttcatatactctctaaaagtaaaaaattcatcttccattatcacatttctgcccttcatttattatctgatacttaaattatattattaaagtcaattaaatatattaatcataacaaacattttcatttacacgataataaatatcaagtagcagaattatcagaaattcaagcatattctgcttttaaatgcatttactcagtagtgaatttcatatttattttacatactcttgttataagtgaaatagagcataaaaaaatcccctagcggggactatgagttttgtgaattttaaaatggaaagggctcatcttcatcaacccaatatgaaccttcttccgttttcttttctcctgaataataaaaatccgcattacaattagggcactccattactggcattcccttccttttacattcttgttctgaactgtattctccatcacaatattcatccatatcagcaaactcatctacgatgtccgcgggagcgaattcactgtaattacatttataacaatgatatttgtaaaacttttctatgtactttatctcttttgggttcatataatatatcctttctgttactcgtctcccttatatcatatatcaccccatattccttatgccatattttccataaaaatttttcagttccacatttactacataataatggatttctttcaaaactctctattattctttgtttccatgatttcttaatttcattttgtttattcttttcttttaataattcatcaatatttctttgtttcacaaaattataaagatgaacaatatgttttgctagtttattgtttattcttgaataaacaccatatcttcgcaccatcctaaatcctttaggtgttatatgttgtgttatttttcctatgaattgcaaagcatcgcactcaataacttttttaagaccatcattatgatcttcataccaaaatttcactctattactttcatatttaattatcctatactctgctatcgcagctcgggcaaggtatctgcctatatattttatagcttgtcttgtatcatctaattttcttttagcattcacatagaaacctttcgggtattttttgtatagataacttattaattgtcttgtcttataagaattgaaatgcttttttattatttctaatagaactttctgccatgattttttcaaatatggatatggaatatactcaacttgcttccaccactttgtttttttatcaactgcaccttcagttactaaagcgtgcacatgcggattccattttaaatctccgccaaaagtatgaattactgcaatcactccaacttcatagttcgagcctttctttttattgtaccaatacttaattacctcatttacaccatcttgtaattcctttaataattctctcttggaataaaaataatttcttagttccttcggtagtgtaaatacactgtgtcgatgtacaactcttagcatgttttgtctttgtttttcagcccatttcattgtatacaatctaccgcatctattacaaaatttacttttacatgtaaacggaacttttgtactttctccacatgtttcacatttatattctgcaaaaccatatttaatatcactacactttaaagccttacttacggcttcatcaatatgctttcgcatatctttcggtaccttattccaatatttatttttaaaatcattatagttatcatttaatatatctcttactgttattttctctttcatcataatatctatattttattagttatccacagattgtccaataatataatttcctatagaataaaaaaatcgcaggcgactatggagctgaagattttttttacgcatctgccttttcgaacgcatgtgagaaaaatttggcaggcgaatatgatttatttttttattcttttatagtaattaaccctagtaaaatatactactataaaattatccacaaatttaattgcattataatttcctaaagaataaaaaaatgcagccaatttagtggctgcatttaatgggatctaaagtaaaaattgaagataattcaacttctacaactacattttatcacatttatttataaattttaagaaataaataaagcagtagtaaaatttcttctaactactgcttttagttttactctattgggcaattgtcttcattaatgttacaacatcatcttcacccggtaaccaagccccgtcttttttagttaatcctgtaataatatctttcttaaaagaattttttatatcatctgttagaatgctttcatctaaacctgaatttccaagggccatcatcattccgtcacaaaagctacttctaaattcagtataatcttcttccttcatccctatcttgtccatattagttttatcatcttttaaaagtagatctaaaaatattttagcactttcttctggatttgctttcgttccgcaacctactagcattattgttaccatcataacatctaacaataatgtagaaattcttaactagagcgcctcacttgctttactcactttttgctctaaggatacattacaaactataatataagttgttggaaaatacaggactcgaacctgtggagcttttacactcactagcttagtaagccagcccattaaaccactctgacaattttccatataagagcatattatttaattgttctccttagtaattcattgtactcattcagtgcaaagtttaatcttctacacgctctaatcacctccacatctaatgattttttttcatcccccataattttgcataaggcctgtctcattctactaatcatcatctctttttcttttaaatattccaaatatttaccccccttacttttttattagtataacccttaaatagtaaaacttatgtatcacttgttacataaacaagctgtaaccaaaatatccatattacttacatatattctatgtataacgttagaacttcagatttaattacttaacatgatgaacctacagaagtcatatatttctagattagtaatttcacatctgttttataaactaattttctattgttctctgtgtatattgtttaacatttcttaagtgtatctaatatattaaaagtaaatgaggtgtttatgatgccaaataatgaaaatgaaattttttatatcgttggcgctatacttactatattagttaatgtgccagagattataagacaaataaatattaatttaaagttcaatgaatctataaagcaccataaaatactatgattaatatgcagaaaaagcgcttagaataattctaaacgcttttttcttccaaaaattaatccctctataatttagaattttatcttaatcaattacagaaatatttattttactaactatatttaataataaaaaatattacctctaatttaatgtaatactataaaggtatattttcttatttacaattaatagatatcctagcagctatctttttcttgatgatattgggtaattgtaatcttgggtaaaatgatatctgcctggattttctggctgatttcctgaatctttttcttcttcaaattctgctgccatatcttgtcttaaatgtttttcataatatactttttctttgtcagttaaattcttcatacttgtatcacctccatttttattgttttcttttgtatgattaatatactctagtatagaaactgcaataaaatagacacttacaagttatacgtaagtgcctagattatttagaattagcatttagaatatttaattactctaaaaaataaattaactataatcattaaattatttaaattttacatttaaattgattccttatcacctctctagtttatacatcttcgatatatatcagcattatttctcttataaataagtaatttttaaataacttatattttaaatttagctataatccttcttaactcttcagacatttgagatagaagtttactagatgaagctatctcctcaacagatgctaattgttcttcagcagctgccgatattgtttgagtctcatcagctatattactacttatgtttttaatattatttactgaatcaacagattctttagttccaacagttacttcagtgatagaatctgatatttcatgaatctgtttagatatttctattatcatttgaaggatttcctgaaaacttgttcctgcaacgtcaacaacatctgctcctgttttaacttcttttgaattttcattcataactgcaactgcactatttgttttattttgtacatcattaataattccagctatttctttagttgcctcttgtgattgttctgctaactttctaatttcttctgctactacactaaaacctttcccagcttccccagcccttgcagattctattgccgcatttaatgctagaagatttgtttgctctgatatgccttggattgtatcaagtatttgtccaatcttcactgatttctcttcaagttcacttataataagcgatgtttcactagtctttttctctattatttccatttggctcattgccttctctacagcatcttcaccagcatttgctgatatttttgccttatctgttaaagatgaaacagattttgtattttcagatactacatttatcttattagatatgttttcaaccactttgtttgtactattcgcaaaagaaaattgctcgtctgctccatgtgccattgttgttactgcggatgcaactaaatttgatgcatctgctgattgctcagcacttgctgtaagctcttcagatgataatactaactgttcagatgtattacctaattgttttattagttcaataatgtttttggtcatcttatctatcgcattacttacaacaccaaattcactcttatcattaagactttcttcttttatccttacagaaaaatcaccttgtgataaagagcctatgtatactacaaagtcatttaatctctttgtaatacgttttgttattagtattcctaataaaattattaagattgaagctataatcacaatacttaaaaatgctactgttgcaatttttaaatttgttttattttgggtgtttattttttcagcaatttgtctattgtgttctccaagttctactaaatcatctaagaaagcatcagcatatgattcaacgtttttctcgtaatattcgtaagcttcttgatttttgttttcaccagctaagtttagtgcaacttttcttccgtccctatatttatctaaattactatcaatcttactgatcttatcagcctcaaaatcatctaatttcatttttttataaagagccatataattattaaattcttcggcacgagtatttatatcttttgttaaattactattttcatttttatcagtagttaccataattctaaaaatatcagctgaaatagcccttgcatgcactctagactcactaagccattcactagatagcagtctttcactatacataacctccatgcttttactagacgtttgtaaaaaatagtaaccagttattcccactgcaaataaccctactaaagaacaaattataagcaaagttaattttttacctacctttaaattattaagccacgtcattttattgtcccccttatcttcacactagaatcttaaatataatttcattattataatatatttattagaatgattaattaaaaataaaaaaccaacaaaaacttaatatatttatgtattactaagttttaattggtcggttgcacaactagctccaaattctcaaagtgcccaaatatagagaatttttcattgcttccaattgttctgttttataaatacacttacctaatatatagaaatattatcatattaatgtaaaaaaatcaatgattcttaacataaattgtcgaaatttattccatgaatttcataatgttttaccattattctcttataatcgtaattttttaaagaacgaacattccctattcaataaaattaattcactagtctttctctaattaatatccattaccttatgtgtaatcttcggggattgaacaacgaaaaaatcctatgcagaatcaaaattaattctactcaggatctcctcttcataattttattcactaataaactacatataaaggctatatataaataggaagaaccttaaaaataaatactaagcattctatttttgaggcttctttttatacattcttatagaattatatcagcattgtgatatcatttattaaagtacccccattcttcgcagtcccatatatctgtagtaatatctttataaaattccggttcatgacatactaaaatcacgcttccctcatattcttttaacgcacgctttaattcatttttagcattaatatccagatgatttgttggttcatctagcactaatacatttgtatattcattaataagcttacataatctgactttagcttgctctcctccgcttaatatattaataggactatctatatgctgccttgttaatccacatctagccaattctctccttacctccgtttgagttaggtgcggaaaatcacgccaaacatcatataaaactgaattagtgctattccatgcaatttcctgctcaaaatatcctatttttctatgctcacttaaagtaatttcaccatttataggttttagcattccaagtaaggtttttagcagagttgtctttcctaatccattagctcccgttactgcaattttttgtcctcttttcatttttaagtttaaaggtttgcttaaaggtctgttatatccgataatcaaattgcttacttcaaagattatactttctggcatttttacagttttaaaattaaaatgaggttttataatttctttttttatttctattctttcaattttattgagtttcttttctcttgatttagcttgctttgaagttgaggctcttactttattttttcttatataatcttcaagctttgctatttcattttgttgttccttatattcaataaatctctgttctttacgtatttcgtatagtttaataaaatagtcataatttccttcatatcttgttagtgttttgtgttcaagatgataaactacgtttaccacattatttaaaaaaacattatcatgtgatattaatataaatgcattttcataattcactaaataattttttagccattcaatatgttcttcatctaaatgattagtcggctcatccagtaataaaatatctggcttttgcaaaagtaatttagcaagtaaaattttagttctttgcccgccacttaaagttgaaacatctttatctaaaagttccttaattccaagacctatcgcagttgcctgtatttttgaattaatactgtaaaaatcatttttatctaatatttcttgcattatagcaattttatttaaagacttttccatatttttctcactcatattttcaagattaatatatagactattaattttgctttctatattaaataaattagtaaatgcttcttttaagaaatttaacgcattaattccttctttcaaatcaaccagttgatccatataaccaatgctgaatttattattccattcaatggtacctttatctggcaatatttgatccttaatgattttcataaaagtcgattttccttccccattagcaccaataagtccaatatgatcaccttttaataatctaaaagatacatcattaaataatatcctatctccaaatgaatggctcatgttttcaattgttaaaatactcatattttacatctccttgtgtcctcacaataaatgatatcatcatgtaatatgaagaccaagtttaagaataaatctgtaatgtttataatcatgctgaaaaaaggcacattctccatagcaatgactgtgaaaaatatgccttttcttttatattttaagtagaatttttttgtttccttattattcttctaatgctaccttcagttaaaaaatactgttcagataaatttttaacggacattccagatgaatatttattaaaaatttctttatctcgttcactaagatatcttttagtctcagtattttctccccatgattttttattttcattttttcttggtatatagatatatccaccatctgtatatttttgaattagttcaattatattatatggcagtatattttgtgctttttcatatttcataatttcttcgctccactctacatttaatatctaaatgagaatgcaaagacctattataatatgaaaaacttaatgtcgatatattggctccaggcaaaagtttttcacatattataatctttgcatggagctaactactattactaaaaacataatgaattcacttccttttcattctataatattatatcacaataacttgtgtcaattttgacgctttgagcctcaaatgtaattcgtattcctaaatcataagaaaatacttcattataatttaactcaacttactaaaaacataatcaatatctttagttattttagtatctataaatccattttccatcatactttttagtatttccattgccttttcgtgggataatccctctctgtagggtctttcctcagtaagtgcctgatagatatcaagacaagtcataaggcgtgaattaaaatctaattctttttctgtcataccaagaggatatccttttccatttaacttttcatgatgatttgaagcccattcagtaatatcctcaaatccttttatttcttgaagggctaatctggtatactccggatgtttcattataattttaaattcctcatcagaaagtttgtcaggcttgtctaatacctcattgggcactgctagtttaccaatatcatgaagatctgcagcaataattagcttcatcttttcttcctgctctaaattataaaaatctgccataatagctgccttttctgataatccttgagaatgtctttgggtatagctagatttagagtcaataatctttgacaacacattcgttataccatgaatctcttcaaatgataattctagactatgctttggaatttctttttctaacgctatactaataaaacttttttctaaattctcccaaaatcccccatccccagcaacttttaaaaatgccttaacaattcgtgaagaaaatgatacattttcttgattccttacaaattcacaaactttattttgcatatcgtgattattattctgtaaatcaaaagtcttttctaaagcatctgcaattgctataatttgcgacattaacggaatctcttctccccttaagttaaagaatcctgtaccatcatacctttcatgatgatacttaattatgtttttcacattagtaagcaatggataatttttaatatttctttcgccaattgtacaatgttcttttacaccttctaataatgctacattttttaattcttttgtggccaatttttcatgcagactatactcacttaaaccattgtcatgaagcattgcaagtgcagctacatcgtgtagctcttcagaacttagcctcatttccttagcgatactaattgaaatatatgcagttctttttccatggttagatgccattccgagaatatccatctccacaaagtctaaagcaaatgaaacagccattaaaaactcatttaacctaaataacataattctcctccttattacactaactttatcttttgtataaaaatattttatactatttccggtacttttaccacaaaattagtttccttaccaattatgatatctattgttatatttttgtcccagtttcactatattttaaaaaaatataagactacctccataagtatgcattaaacaccttatacaagtagtctcacattatatatagcactttttatttctattgtgctgtacgtagttatgaatttctattttcctaataattcatcaactaaagctctattcttttccacacaatggccgcagccagttcctacttcagttttttcttgtacttcttcaaatgattttgcaccattagcaatggcattctttatatcttgtaccttaacatttttgcatccgcatactactttatcattgtccacaatatcgtctcctttaactgtttttagatttaaatttgaaaccttttaacaattattagttttaacacttgcatctttattatttatactaatattgaaattcaagacaaatatagctcaaagtgcaatacgaatatctttggtgtaaaagctttgattaataaaatttcacaaattcagcagcgggctttctatatcctctaattttattactactcttgtccattttacccatagtaatcattaaaactgggacttcattctctggtatatttaataacttgccgatcttctccttctcaaaatatatcattgggcatgtatcccagcctttatttttagctaataacataaataacattgctgacaatgatccatttcttatagcttcatcatgcttaaattcttctccccagccttcataaagactattaatagtattaagcatgatttcataatcagttttatcaatcattccaagcatcattgagccttcataaattttatctgctgataagtatgcgtttttatcccctgtaacaattatagttgccgaagcagtttttattttgtactgtttaaatgatgcatcataaactttctccataatctctttatcttctacaacataatacttagcatgttgcaaattaaaagcagaaggtgcaagtgaaagttctctaaatatatcattaaaatcttctctaggtattttaatattttcaataaatttattagctgatcttctttctcttacaatttttaaaaaatcattcattttaatccctttctttattcttattttgtctatgaagttcaaccaatctccctctgaagattagtcgaacttataccatttttaattttctttcttcatttctaaaattaaaatatgagatgtatctttagctttgattaaaatatcttcctcaactatttccattccatctctattatttaactcaatatcatttattatagtgccaccttctatttgaaccaaataggcctgtctcccttcattgacttgaaaattaatttcttttcctttatcaagttctaaagaataaacatttgtatcttgatttatttttattggtgcatttccatttctacttgaaaccatatgaagccatttattttgtctatcgctccactcaaatctataatctccataattaggcttataatcttccttatctgggaatatccatatctgtaaaaatctcaactcatcttttcctaaattatgctcactatgatatactcctgtaccagcactcatatattgaacatgaccgcgagttattgtatttttatttcccatgctgtctccatgtgtaagctcaccgttgactacatatgatattatttccatgtttctatgtggatgagtatcaaatccggtgttagattcaactaaatcatcatttataacccttagaactccaaactttatattatgtggattatagtattctgcaaatgaaaaatgaaatttgcttcttaaccatcctaaattactactgcccatatttccgctatcaattcttcttaacattttttatcctcctccattttatctaaatctatcaaattttaaatcatattcacaaaatttactttatcaataagtaatagatatgagagaatattaaaaaagtattactaacaaactcgaagagttttatctaatattcctacttcctcactattgtcttttaactctattatagaatataactaataattcaatactaattagttaattactaattagtgctatttacttaaaaattaaggtgtaagttttactttatacacctgataatttctttaacgtatttattaaactcttcttctcttcaatatttaaagggctaaaaatttcacttaaattatctacatgcttaggaaagagttcgctcataagctttcttcctttttcagagatgcttattaaactcgcacgtctatccttaggatcaggacgtctctcaatcaaatcatctttagctaagttatctataacaacagtcatattgccaccggttgaaagagttttttctaatatttcgctgactcttaaatcacccttatgatacagtacttcaagtactccaaattgtgaataagttaatcctccttcttttataattctaagttctcttttgttaacactttgtatgcatcggcttaatgctataatagcttttaaatttaaatcatttaattctccataagttactttcttgttatccatggcataatattattactaattagtaataatgtcaagagtaatatatatcacaattgaatttctaaatcatgaccttaattgagttcttatggtactagagctttaaatgcaaatttattattgcaacacatataataactagaaaaataaataaagccatattggttttatacaatacggctatctagtaataatattgtgtttatgtaatagcaatccacacttcaataattatattattacacttcgtgaagacatttattagtagggctttctatccatattccctcataattgtatcttgaaccatgacaaggacagtcccaagtcaaatcatcagcattccatttaagttcgcagcctaaatgagcgcactttgttgatactgtatatactttgccttcattatccttatagacaccagccttttgacctttatattctataatgcctccatgaccattttcaatactatttaaggtttcctctggaatatttatcctctccgcgataaaattttttgcagttatagcaagatcctttgcagcatttttcatagatgctgacatgtcaaatctccttggtgagaatatttcagaaaagtcattttctttttcaagtatcatatcacttattatcattgcagcaaccattgaagttgtcattccccattttttaaatcctgtttcaacatacatattaggagttttagatgagtactgaccaatataaggcacattgtctaaagtaatacaatcttgagttgaccaatgatatttttctgttgcgtttggataaaattctttagcaacttttcttaattcctcatatgctccaccttcttcattttcccctgttcttctagctgcaccatcaagtattaatagattcttatagtttctaaatgaatatgtatttttatcaatacctttatacattccattaacatcttgcgcattttctaaagctatagcatatgctctttcttgatgcattctcataaaataataacctggagtatttaagaatggataatgcgatgctaccactattttatttgctttaattttcatatcattctttgtaactacagtattatcttccgtaatatcaagagctactgtattttcataaatagttaattgttctgaaattggtcttaagaattttagtggatgaaactgtgcttgattcttaaatttcaatgcttttttagcttttacaggaatatttacctcatctacaagttctgcatcaatccctaatcttttcgctgcattatattcatcttcaagatctttaatgttatcagaagtatacaagtatgaatctttatgctcaaaatcacaatcaattttttctgcatcaattatttccttgtatctccttatagcaagttcattggctcttgcatattgactggcgccatcttcaccaaattctttaattaatttatcgtaaattaattcatgctgagatgttattttagcagttgtatttttagtaactcctcctgctatacttctagcatcaattacaacaacatctctcccacttttatttaacatatatgcagtgagcagtcctgccattccagcacctattacaagaatatcgcattgaatatcttgatttaaagtttctctttttctaaaattaacctcggaactccatacactttccatgtaaatcaccttgtataatgaacatgtagtaaaaattcattatacttttcctttcttaataatttttactatacttaacataagacgctgtggattagttttttcacctatagctagactatttcaattgaggatataaccacagctttatgcttatttgttaattagttagataacgcatgacgttttatatagagcaaggatacatttagcatgaagctacgtggagcatagcggactaaattaaaaaaggagttgttcttatgatttatattggcattgatgtagctaaagctaaacacgattgctgcattattgattcagatggtgttattattaatgattctttacgtatatccaattcacgtgaaggttttgaattactttattcttcaatactttccgtcctacctaacaaggatatttctaacgtaaaaataggacttgaatcaacaggtcattatagcactaatctccaaaactatttgtatgctaaaggctttcacctatccattctcaatcctttagctacaaatcttttccgtaaggctcaaacccttaggaaaactaaaaccgataaaacggatgcactagttattgctaaaatgcttttctctgatgatacaaaatcctattcacctgtatcatatcaaattcaagagctaaagtcactaactagacatagatatcgcttaattggttatagatctaggcttaaactatcaattactagacttatagatataatttttcccgaattaccaaagtatgtttggtctattcatcaagtctctgtttatgctctcctatcggagttaccgagcccgaaggaaatatccaattgtcatttaactaaattgacaaaccttctggctaaatccactaaaggcaaatatagtagagcaaaagctattgaaataaaggaagtagctagcaattctatcggaactagcacacgttctttatcttttgaacttcagcaaattattaggttaattcgatctgttcaagctgaaattgatgctttagataagcaaataaaggatgttgttatagaaatagactctcctttaatgagtattcctggaatctcttatacactagcctcaataattctagctgaaattggagatatagatagattcactgatccagcaaagcttttagctttttcaggacttgatccatcaacatatcaatccggaaaatataatgctacacatacacctatggttaaacgtggttctacctacttacgttgggctatattaacagcatctagaactgtttctatgcgtgattccacttttggggattatcttgcaaagaagcaaagtgaaggcaagcattactatattgctatgagccatgtagcaaaaaaactaatacgtgttattttttatcttttaaaaaccaatacttcatttgtttcacaaatttaattccttaattttccaagcaatgtgattgctttatttgtcatgcacttttttattgactaaaaaatataatttttttattaacttatattgacttcatatagttagtctcatgcttagtattccatttttttagatactatacacatattcctattaattcctgcaattaatcttaaaacctcagaattacggaaaaagaagcatcaaaaatatacaaaattcatgatgcttctattatccttacggaacaggactacttttaagattatattattctctcaaacgctattcttttatttccgtcttctaaatagattatcccacaatactggaatttgtttttcttaagcaacttttgcatagatatattttcttcatgtgtatctacttttatgctatgtacccctttacttaaacaaagccccactacatttttaataatttcagacgataatcctaatcctttataagtgttatctacagctatcctatgaataactgcatattgattattagtaatccattgaccttcagaaatagaatcatatgttttttctccatcaaaagaaactgctgctgtagcaacaatattattgtcttttaacaaaatatagctatgtttattaacaatatcatttcttattgtttcaggattaggataattattctgccattgattaattccttgttctttaaaataatcttgtgcttgcttaataatgctcattatataatttatatctgtttcaactgcttttctaaattccatttctattctcctcgtctttatacgaataaatttatatatttcaataaacaatctatactctaattaagtttataagttctagtcctaatttcgtaacttattgaactttcaattaccactagtttataccaatttggtttaaacctcaattacattttcataagacttagctaaatactgcgctattcttaaataaccctataaaatcctggaataaaaaaataagcgtaaacactactaaaaatcatttagtaatatttgcacttagataatacaaaactatattaaattattgctcatttagcacctatttaatttatttgtttgactttattttgaattttaaaatattatctcaacttaaaatatttgtgtaaattaaaaaaactatagaataattctttgaattcctccttcttactacctaggtttaaatccgtaatttttgtaaagttacaacctttatagcatagtgcttttactatttgatgaagaggtgaattttccaagtaattactcattggatatctatttacaccacttttaagggttatatattcaaagtcaatatatggatgataaaacaaactagcaagtgtagtttcatctaaattgtttattctatcaatcattttatcaataccatctttttcctctacatagcctaacggtgtaggtatatacaaagttgtataatttctagggcttttaactattctctctccccaaacgcctacaaatggttcataaataatatcaaaatattgttcaaatatgctttgttgaaatgcagtagctgcatagtggggtgtctcaaaaaacttaacaggtaattctaatctctttgcagtattaatagccgcttcaactcttcttcttatactcttttcatcattatttcttccttcattaaactcggtaccaactgcgcttacttcatcatcatactgatgagtataaccatgcaatccgattactccatttctatttaataaatactccattgtaaatagaaagttagcattaggcatactataatcttttgatatatcattatcaattccattttgaggatcaacgaaccttggtatccatgctatatggaatggtataccagctaaaaacatgtaatctgcaactactctaagcttttctaagttatcagaatctaaatatctcccccctgctgttatgtcttcaaatcgaattagagcaactcttccataaacatttttgcagttcttataattgcttttatcccagtagagtgaaattgtactcctgatataatcccacttagatcttatacttaatattttgcacatatcaaataacgatatgtacaatacattatcaattatagtaaatttataatcatcaatacaataatctatagatatagatgacttctctttaaactttatacctattttactctccttaatattaatttcgcctcctgtctgatcagcaaattccaacagtggcataaaatagcagttaatatttttatatataggactattaaactttattgatctaccttcaaaatttatcttcaaatcatcttcaactaaaaacatttttttatcataaaacatttttcttcacttattacaatattgttcctcaaatatacagtatgtttacaaactcataatgccactcatcactcatacaatcttttaacgataatataaagagaatatattttttctaccttcacataataaatttgacctatttaaattttataacattagactggcgaaaggggttcttgaattgaagaaatttatttcaatactttccatttttttgtttctatcatttagtattaatactgctacagtagcggatataaatcaaccacgaacttttaaagaaggattttataacatacgagatttaggctttatggaaaatgtttcttacagtgtccagaatttatctgaatatagaggatttatggttgtatttgattctgaacagaaaatacagcaagctatttcattagatccacgctctcaaaagtttccacttaaacccattagaaatagtgatagaattgtaatattgggtcaaggcgcgttaactttttcttaaataaaagtctatttctcaattattatttataattaagagtatattttctttgaatactgtaaataattaaaatgcaatttcatataaccaaaaagagatagctttattattatctacctagtttaaatgctatctctatttttatttatttttttagttcaaattactatatccaatacaattacttcttatatgtattattagaaataaaaaacctctaatttcctaatatctccgtctataattctaaatcattcatattatttttcaatataattatatgcagattaatgcctacacccctaaaatattacataaagttccatttctaattttatatcttatatgaatttatgagattcaagcattgaattttcaatatttctagctattggcaatttgataaagaatgttgttcctatacctaattctgtttcaaaccatatttgccccttatgaatattagtaatagtatgatatgccataaataatcctaacccagtaccaccacttcttctaaaagaaaaaggttcaaacaaagtttcacttaaatcttctggtattcctcctgctgtatctttgatctgaattatcatgaaatcctcatctttttctgttaaaatcttaatttccccaccttcatccattacttgaactgcattatttataatattttcaattgctctctttaaaagcttttcagacatatttatgtgttcttctaaattatttttgagtgataatttaatttttttatgctcacaaataggatcaaagtaacctataatattttctattataggcatgactttttgaggtataagtttttctggtttaaatatactcaaaagttcaataatcatatcattcatctcatcagcttgagttattatcctgcttaaatagttatcaatcctatatttatcagaagttatcattcctaattgacctaatcctcttattactgataatgggtttttaagatcatgaacagctgttgcaattaattcacttgtcgcttgtaaatttatatgctctgatggagatttatcgttactattatttatatacgtaattgttgattcaattgaatttacacaagctactaatatatgaagtctttctggtcttgcatatttaactggtacacttatgtccattgcaccaataattttattatcatactttataggaacaccaatacatgcacatccaccataagcaataccataatgttccactccataaacaagaactggttctcctattgccaatgctgtacccgcaccattatttcctatattctcttctgaccaacttgctccaatgcatagccctgcctttctacctcccagttcttccggagtacctctataatcaataatccacccatctttatctgataaagctacaatatgaggtattccagtcaggctcatggataaagaatccatatataattttgaaacctcaataagttgtgagttttcttttatccttttctttaaatctttatctgataaaaacttaaattttattttttcaggctttattcctaattcactgcatcgtttccatgattctaatgtaatctttcttgcagtaggattactatttacaattgatataaaactctcccactcctctaagctatcatttgtttctcgtagacattccattcctacaccaccctaatatttgtttttgaattttaaataactacattataatattcgacatttggtctaatattcctctttttccacctttataccaaatattataatttttaattgtatataatttatctaaataataactgaatatgtcttttcattgatattaaagtaaatatgcatctaaattattaactacattttttaattaagagtaacttgaaatattatggaaatatatatttaatagagataaaaccctattgacattgatttattaaaatgttaatctagttttattcaattaaattacattatatattattttaatcaattttaatacggaggtttattatgggtttaataggtctaactaaaggtacagatttagaagaaaaaattaatgaaatgtggaaggcagaagcaataggtgctgcgacttatcaagcttttgcaatagttgctcaggaaaaaggtctatcccaattagcagatgaactaaaaaagatttctgctgatgaagctcgccatggcggattatatgcagcactaaatggtcatacaaatgaaaatttacgtgatgctttgagttcaatgtctattggtgaaatctctgcaggagaaaaaataaaagaattatctaaaattcttgataaattaggtctgatagaagcagctcaagctgtatatactgctggcgaagatgagtgtagacatggtgaaattttaaaagagctagttaaaaaatatttatagttgatgaaataacataaatctaacttataattgatttatctatatccagcactataaaaatataagtttaattcaaaatgcaaaaatgtaatagcactaaacttgagattttggttcgaaccttaagtttagtgctattatacacaattgtttattaatttttattaatactctctaacaaatctttttaatcccatccttctatcaaatcgttttttctgaaattaatataaactaggcttttcattcatgactacctaacattcttaaaaattatttcaaaaatcttattctcattattaatatctataattatagtccgatatagttttcgcactgaaaatttaaagtttcaagttaattcttattatttttattaagtcactttaatctttctaaagtctaactacaagcatagttataaattttcttccatatgtacaggttggaataaattttataaataaagaaagcctattagtatatagttaaattaaaacatatggaggattgaaatgaatgtattaaaaaagcttaagttatttattataattgttttattattatcaaatataattccaaataatacatatgctttacaaaacggcaacaatcaacctcagcttaaggtagctgtatttataaataatttcgaagacttatttctttatgaagtaaagaaaaatttagaagatatccaaactgaaaatgcaggtaaagttcaatttactttttttgatgcaaaagaaaatcaaagtattcaaaatgagagtattgaaaatgcacttaatcaagactttaacctttttgtaatacgtcctgttagtaaaaacctaagcgatatcgaaggtacttttaataaaatacaacaaaagaatattccattaattatcctatacgaaaaaactccatcgatagtaaacttacttagaccttaccgcaacagatctattatcattaatacagatcttgctcaatctggtactcttgaaggtaaaattctagccaatgcttggaattcaaataaagtggttttagataaaaataaagataatataatgcaatatgctcttataaaaggtccatctgatagcaatataacagctataagaaacaaatattcaattcaggcaataaatgaatctggaataaagactcaggaaatttcatcggttacctgtgattttcttgaagaatgcgcaagaacttctgtagaatcactatttttaaattatagtaataaaattgaagcaataattgctaatagtgattccatggcaataggtgctgttaaaggccttcaaaaatatggatacaataaaggagacccctctaagtatattccagttgttggagttgatgccttgccagaggcacaagaactgattgcaaaaggatttatgaccggtactgttaagcaagatccacgcgaacatggaaatgcaatttattctataggaatgaatttagttgctggtgttcctcctctcagcggtactaattataaatttgatgaaactggagtcgcaattgagctgccttattctgaatatgctaaataataataacttctttaatcacaaatacataaatctttatcatttatctatatactggaatattataaaataatatttttataagtcccttatccttagggacttatttttcataaaattttactagtacacactggcttgtaactcgttaataaacttatctaaaaagatatttactttatttttatctgattgagttccgtataaattaacgctaagtgttgccacattgttaaatgttgatatagctaactgaaagtatggatcatattttattgatcctgtcatataagcttcaataatattagtctcaccaaatgtaagctgtttttcatcaattatacctatattagtaaaagcaattggtggattcacaaattttttctcaactattcctcttgcaatcttgtaaggaaaaatatcaaaaactttttctagcatagctatacttttaatacacgctatattagatttctgtttattcatttctttttttactttataaagtgtttcttcaaaagttttaccagtctcattacctatattacagataaggtttgtacataaattacagaagccttctcctctgtgatttggaagatattttcttaaatctacagtacaaggtatagtcatacatcttccaaacaattcaaacaaaactcttatataggtagtaagcataatatcatttactgtagcctcgtgctttttagcataagctttaagcatattaaatttttctttattaatagtgcgaatttcaataaacggattgctaagatctccctctaactcaaatttcacatcatcataggtaaatatatcagctttactaaacattatttttgctttctccgtaattgatacattcttaagtatttgtttaattttacgattttttcttagtataacttgatagtcttgattattttctatatttgaataaatattactaagcatatataaatattctttaaatcctgcggcatcacacaacatatgactcattaatatacataatgtatctttttctcccactctaattaattttatatttaattgcgggccattaaatgcatctatttgttgataaagatactgtttgacacattcttcgtttccattttgtatttctacaaattcaattatgtcacttgcagtatatcctgcttcttcccaataaggctgccttttggattcattatatctacatctaatcaaagggaaaacattaatagaaatatcaatagccttactcaatcgttctaaatcaacttttccagaaaattttgctataaaatggagagtatgatcattaatccttttaacttaaaaaagatattgcaaaatatcccatgcttcagctttataatttttataagaattatttagcattttacgcctccactaaaaaacatatttagtattattttactactcatatctaattataacatgtttgctcattgatatatcatctgatttttactgtatttttattttataatcttagaataaattttatatttataccaaacctaattatgagtattatgatttaaagcagttacatgagttggaggattatttaatgaagacatttctaaaaacaatagtatttattcaaactgtgttaattatattcatactaataaatatagctcatgttaatacatttgctagttcaagtatagatgttagcaatggcaaagtagctaatgttgcagtattactatatagttttgatgatccctatatgttagaaattaaaaagagtttagaggacattgaaaatcaaaataaagataaaattcactttactttttatgatggaaaaaataatatggctatacaaaatgaaacaatagattctcttcgtaagagtaatattgatttatttatattaaagctagttgatacaaaagaagaaaacataaaaaatatcatgcttaatctaaaaaatgttccaattatttttatggaagttactccagaagttgtatcaaaagtttccaaactttatagcaaagctgtttttctgtattcaacttcaagccacgaaggtgttttgcaaggtaagattcttgtggataaatggaatactgataagaaatttttagacaaaaataatgataatattttgcaatacattttgctaaaaggtgaagtcaataacccatacgctattgaaagaacaaatgatgctatttcaacaattaatggagcaggaatacaaacagaacagcttgctctagtaaatgccaattggtttagagaattagctaaaacttcagttgataatctatttctcaaatatgatggtggaattgaagcaataattgctaataatgatgctatggctttaggctctattgaggcactacaaaaatatggatataacaaaggtgataaaaacaagaatatagccgttgttggaattgatggtctagaggaagccaaaaatttaatagacaaaggattaatgactggcacccttattcaagatacaaaactggtagctgaggccttttataatattggaatgaatttaattaaaaatgaaagtcctatagcaaatacaccttacaaactagataatggagtaattacgattccagaatcttataagccatacacaggtcctgttagcagcgaataagaagtctcaataaatttaaaaatagtgagtttacttataaagcatactcactattttcttaaattaaattcgttggttaaacaacattctgcaaatattatataaatcttaagataacattctttaatgcattcatatcaaatggtttagaaatataatcatccattcctatatcaatgcatctttctctgtctccattcatagagtaagctgtcatagctattatattaacatgttcctttgtctttatttctttttctctaattattctagtagtatcgtatccatttaattctggcatttgaatatccatgagtattaaatcaaatgtcttttcttttagcttttctaacgcctgcttcccatcatatacatactcatattcatatcccaatctatttagcatttcacaagttatcttaatatttatttcgttatcttcaactaataatatctctttatttttacttgatgctatccgagtattttctgtatttaaattatgattatttatatcttctgcataattcaataaaaattctgccgtgaaataaaaggtgcttcctttattttcaatactttcaaaccatatgtccccattcattagctttgcaatatcttttgaaatagcaagccctagcccagttccatcatattttttagtataagtcatatcttgttggacaaattttttaaagatatcatttttaaattcttctttaatcccaatacctgtatctttcactgaaaattctaatgttagtttattatttgtattatttaatttccttaccttaaacattatttgacccatttcagtgaatttaatagcattattaataagatttataagtacttgatttaatctaatttcatctcctattaaatcaaagtttatatatggatcaatatagtaaaacacttctaagctttttttactgcatgctatagataactctttagtaatcctatctaaggtttttttcatattaaacggctttaatgtaagttcaaatttccctgactctattttagaaatatctaagatggtatttaatattccgagtaacaatcttgatgaattactgagcatgtctaaatattctttttgattattattaagttcagttaccttcaataagtctataattcctattattccattcataggagttcttatttcatggctaatatttgcaagaaattcacttttagctttgtttgctttatccgcttcttcctttgctttttctaattcctgataattacttcttagctcctcttctattgctataagttcttcatatagagctgatatctcttcatatttatctcttaactctttttccacttttttattttctgttatatctctagtgatattagatgctccaattaaatttccttcaaaatcgtaaataggtgaaactgttattgaaacatcgattaactcaccatttttctttcttctcttagattcgaatcctctaattttttctttattttttatcttgttaattatttcatagaagtcattaattttctcatcaggaattatgatagatatatgttttccaatcacttcttcttttttgtatccataaatcttttcagcacctatattccaacttgttataattccgtctaaagtttttcctataattgcatcctcagtattttcaactaaagaagcaagtcccctaatttccgcttcatttttcattcggtttgatatatctcttattatgcttaaaacaaatctatcatcgttaatttctattcctattgatttcacttctacaggaaaactagttccatcacttttaaagtgcatagtttcaaactcaacatcacctgatttagctttttcaaattgcatgattgcaagttcaattctttccctatttcttaactcaaatatattctttgaaagtagttcttcttcggtataaccataggtatccactgcctttctattaacttccaatatattgccttggtttgaaaataaaattattatatcattggcattacgtatagcagcttcatatatttgtaaataattatatttctttttattaatattttcattggtttcactactcatctatcacccctccttaaatttcgtaaattaaaataacaaacgaataagattgcataaaatatgattgtcatccgtatagcataagcaggcttaatagttcatttaatcattttttaacattttctcaagttcctcttcacaaactggtttactgaaataatatccctgaattatattacaccctaaatttaccaatacattaagttgctctttgacttcaaccccttcagctataaccttgtacttcaaacttttcgataagctcaaaatacactctattactgctctgttcttatcgttctcaatgttatcaataaaagatttatctattttcaaagtatttataggtaagattgttaaataacttaaagatgaatatccagttccaaagtcatcaattgaaatatttatgcctttttttattagttcatgtaaatcagcaatcttctcatcatctaattcaattaaagtactttcagttatttctatttcaattaaacttagaggaattttgttttcttcacaagtttttattattttgtctttaaaatctctttcttttatttgaaccggtgaaacatttatgcagatattattaaatccatatttcctctccttaagctctctgattttacgacatgctttctcaaatacccaatctcctatatctacaattattccaatcctttcagctattggtataaattcagctggagatacaaaaccgagctttttactattccatctcaataacgcttcaaatgcaactaccttattatccaatgcatcaatttgcggttggtatacaatagaaaattcatttttcttaattgcttcttttaattcattttcaattattattcttcttgtatataacctacttaaagcttgttcgaaaaaggtatatgtgttttttccatctgtcttagacttatacattgctagatctgcaaattttaatagatcattcatattattactatctcttgggaatattgctattcccatgcttgttgtaatatacagctggttttcattaagttcgaatggattcttgcaatattttaaaattgtattgcacatctctttaactttttctatagaattaattctttctataattacagtaaattcatctccaccaactctgtacaactttccatagtcctttatacacacatgcaataattgtgagaatacttttaacataagatctccatagtcatgtcctagggtatcgttaatagatttaaaattatctaaatctatgaaaactatagcgccctcctgactgagttgaatatttttatctaagacattctttatatccattaaaaacatatccctattaggaagctttgtaagtgaatcatgatacaaattatctgaaattcctttttctctttccttttcttcagttatatcacttactaatccaaacatacgagttacaccttcatttttttcttttataccatttcctttaaacaatacccactttaatttattatctttagtaatgactctaaactcgcttatatatgaggtcactttatctgctacaaaaaagtttaaatcagtcaatgcactttctctatccttgtttatagctaccttttcaatacaatcaattaaactgttaaaatttttcgagctatagcccgtaattttttcccatgcatcagaaataaagaaaccatcttcctcaatattccattcccaaactgctatattagcttcatctattgcttgtttatatttttttaatatttcttcataatcgaaatcacttttttctatctccataacagatttctttgctctccttaaaaataagttcatttgattatctttcatgattataaccttctttgtggtcatttaattccttcatatactctactataagatcatctaaatgctgacttatagttaatccattgtctatatctacgtctccatcaagtgtacagcaaacttcattcaaaatttctcttacagaatttatattttgatttaactctgataatttgattgttttttctttaatattcgttgaatcaaattcataagtactttcttgatttacaattgtcctatttcttccactagctttagctttatagagattcttatctacttttgataataaatcataaatatttacatcttcatcagaagcttcatacactccaaaacttgctgttatttttatctcaataccaccataattgaaagatgtattttctaacaattttcttatcttctcggcaactttatatgcattcttagactcagtataatttaatattataataaactcttctccaccaaatctacctacccagtctgacttacctctgacagatttcaatattacctctgaaaaatcaatgagtattttatcacctataatgtgcccatattgatcatttacttttttaaagaaatctatatctgccattattatcgataaaggcattttgctaattttcatgtagttaatatctacagggagtctctcatttatatatcttctattatataatcctgtcaattcatctttaattaccttttcattcattgagataatcaactcttccacaaagtcagaatcttcagtcatcttatgaaatacgcttccgatattagtaatatcctttaatatttccacaatatatatcttgccatttaattctactggtgttgctgtaattaagacaattttttctttatcatattctatttttacaaatgtatcattgttgttatatgctcgaatagaaatacagttttcgcaaaacgtgtgtttcttccataataaatagcatgtaccatttaacccttgtagctcattgtccttaacaagagccgcttttttgtttattggatcaactattcttataacatcatacaattttttaaagatagatagtctttccttcacttggtctattacttccataagattccctcccttttaaatctaaaattctctcaattccccaaaaacttatttactaaattcatatgtacttcttaaaacctcttttagaattgttcttctcattacattaattcaaaaaatatatcccatagccttgaaataactttatcatttattcttatatttgatgttatcatttcataaagtaaataatcctcaagctttttacatttaaccaaataattatttatatttttagttataaatttatcattatattgaggattacccatgatatctagaataattttattttcttcagctatgtagaatttatatttttctcgtattacacttgctatctcttctggtggaaacatgtgacatctaagaataaactttcttttagatatatctgatatataatactctatcttcttttttaatagagtatacagcttttccttaagaggaatattcttgtccattgtctcaatgctctgcatgtaatcaatataatccttataaatataatcataaatataaaaaaacagatcctgcttcgacttatagtaaaaatatatcgttgatgctttaactccaacttccttgcaaatatctctaatattagtagcctcatatccattctccagaaaaagtctaaaagaagtataaaatattttatctcttgttgaattttccaaaatacttacctccatttacaattttgctgaaagttttttaataactttgctattattctcataaattacaaaattatatatataacgttcgttacataaatcatatcactgtatttttctccattcaattcattttgtattctatttttactcataattcgactcattttgaatgaaaactatttctttaggaatataatcatacctatatttcaatacatatatctaacaattatattttctttgcagatttgaacctaattaattaagttttaccttgatttatcatgggtcagattgaatatagatttataaagaatagaaaaagcagcaccaattattagtgctgccttataatcttctatgttcttaagttgaattctatgatatttaacaagttttcaatttcaaatggtttagatatgtaatcgtccatttttgcttttatgcatttttctttgtcttcccgcatagcatatgcggttattgcaattattggtatatgttttccttctaattcttcaactcttatagcctgtgttgtttcaaaaccatttaattctggcatctgtatatccattaatattaaatcaactttattattctttaatatatttatagcctcattcccgttatacgctgaaatatatttgtaaccgttacttttaattatattttccattacttcttgacttattaagttatcttcaacatataaaataactttatcttggcgatcattatattgattaagcttatcactttcaatgttttttctttccataacttgttttttatcatttgtttttttaaattcacatgtaaaaataaatgttgagcccttacccaaagaactttcaaaatttatttctccattcatcaaatcagcaaactgttttgaaattgataaccccaatcccgttcctatgtactttttcattgatgatatatttccttgagtaaaattattaaatattttatctttaaactcatcatctataccaatccctgagtctttgatcgtaaattgaattttttcactagtattatcttctgaaatcatacttactctaaatgatatatatccttcatctgtaaactttactgcattactaattagattagataatatctcttttaacctcagctcatcgccgacaacttcaaaatctatgttaggatctaagtaataacttacttctaatcccttcgaatttccagtgactaaaagactattataaatactatttatagtctcttttaaattaaacggctcgctattaatcctaaacgtacctgattctattttcgagacatctaataagttattaataagtctaagcatagtattggctgaatcatttaatattctaatatatttttcttgcttttcattaatatcttctaactttagtaattgtatagctgctgtaattccattcattggagttcttatttcatggcttatattagccaaaaaaattgattttgctttattagcttcttctgctttctgttttagcaattctaattgttcacatttttctcgcagatccttttctattatcttcctgtctgtaatatctttatacgttgctactactcctgaaaaaagattattatcatcgtaaattggagatgcggacattaatacattaactaagtttccatccttgtccaatctgacagtttcataatctttaattacctttcctttgttaaccatatctattaatttttgtggttcacttaatttatcttttggaattagctgcctcataccatttcctattatttcagcttctttaaagccaaactttatctctgcccctttactccaacgcgatatattcatgtctttatcaaaaactacaaacggatcgtcaagtatatctaatgatattgaaaatatctttgaatctttaaataactcctccatatcggaaatatctcttataatgctaacagccatatctcttgatttcttattactataaacagatcttacttcaaccgggaatcttgtcccatcttttttgtaatgataacttttaaactttattcccctatctaaagccctatttaattgatcttgggtgaattctctgctatcttcatttctaagagtaaagatattcaaatttacaagttcatcaaaagaatagccatacgtttcaatagcttttttatttccataaagtatttttccgctcctgcttactacaagaataatatccagtgcattatctatataatcttttccttctatgaacaacttttcatttgataatatatctttgcttttttctaatactgagttaaccataatttacaccatccccttattatttttataacacactcttttattctcataaataaatttcgaagatgttataaatttcttcaacattaaatggttttgaaatgcaatgatcaattcctagattcataagtatctctctattttccataatggtatatgaagacattccgattataggaatattttttccttccactcttgatattctcattttcttaattttttcaaaatcttctaattcatctagtttcatatctatcaatattaagtccacataattacgctttaggattttcaaagcctcacttatattatacgcatgaatatatttacagccttttctctccactatactctccataacttctttgtcaattgaattagtttcgatgcaaagtatggatttatttatccataaattatttatcttatcatctccactaatcttattatcgttcattacctccatattcttttcataataatcactttttttaaaactacatgtaaacataaatgtagaaccttctcctaatgtgctttcaaagcttatatttccattcatcatcatagcaagctgcttagatatagacaatccaagaccagttcctgtatactttttatttacagatatatcaccttgactaaatatgccaaaaattttactcttaaatctttcgtctattcctatccccgtatctgctattgtaaatttaatttttacatagtcattatctgacaatactttcgttaccctaaaggatatatatcctttttccgtaaatttcaccgcattactgattaaattatctaatatttgttttaactttagttcatctccaattactataaattctgcatctggatcgaaataatatcttatctctaatcctttagaattgcctgattctaagagacttgtgtaaatatcatctgttatttttttcaaagcaaatttaccatcatttaatttatgtataccggcctctatttttgaaatatctaaaatattatttataattgttaatagtttatttccagagttttttagcagtattatatacttactttgctcctcactcataggtgttttttcaagaagctgaattgttccaaaaataccattcatcggagtccgtatttcatggctcatattgtctaagaataatgactttattttattagcaatttcagcttcttcctttaataattctaactgcctatatttttcaacaatgattttttctttttcagctagatctgtaatatcatgataacaagctaaagccataattaaatttccacttgtgtcatatataggagtagaatttactctaatagttagctctttatctaagcgcctaattataactgttctatttcttattttttcacctcgtaatgcgcattttaaagacaaattctctacatggatttcatttcctgatgtatcaaaagcttgcttggttgcgttaaaatcttccacattctttacagcataaaaatcagaaagaaaacttcttccttcagcattcatcaaaattattttaccttccttatctgcaatgtaaattgcatcagaaatgttttcaatgacagcttctaattgctttttttgcatctttataataacattactattaatttgttcagtaatatttcgagtacataatagcgcttttgctatatctccaccttcatcatataaaggactgccacttacattaaaatgatattctaatccgtttctcttaagtgtcattctatatcctttaaccttttcacctcgtaaaactcgatagctaggcatattttctggacttattatattatcattggaatcatagaattttacttttaacaaattctcactaattttatttactagtccaatattacaaaaaaagtcttttgcgctagaatttagaatgttaatatcaccttctttgtcaatcgtaaacaatccatcagacatatttctaattatagcttctaatttgttcttttgctcttctataatttttgcttgtacagattccgttatgtcgtcaattagtaaaacatatctttcaaagtttccttttctatcaaatataggcttgccactaataataacatgtttctcgaaatttctagctcctattattactctatagttatttatttcctttcctttttctatataactaagcttgctttcttcaaattcaattttatttttatttacatcaaaaatcattatttcatcttttatatcatttatattgcttattttatttgtttgaaataattccaaaataactttgcttatcttaattaaccttccactcttatcaaagatgcttatatgctcatctgctaaatccattatagcctcaatttttttatcccttctctcaatttcagcagcttgagcttcaataacaattttatttcttatgttatctgttacatcaatacgattctcaatataatattttacttttccgttttcatatattggtactattgatgaatcaaaatatgttactcctgttccatgtctatcactcataaaatcttttacatagcacgtctctccattacttataacatttgtccatttttcacttattttattttcgttaaaatctttaactatttctcctattgttttaccaatgcaattctctttcctattaaatggttcatccagatagttaatatatttttcattagcttttaacaaagttatatctggcgcagaataaattgcaattccatatttattatccaaacataactgttctgcatataggaacttattttcaatacgtgaattctctttttcgtcgaaaaaatataatatattcgttttgccgtgatctatattcttagaaataatcacttctcttggttcaagtgacttagtgaatatgtagacactcatttcatcactaatactttcaaatttatcaaaaaaattagatttcaatgttttactaagttctttatatgatttgcctaataattcttccttgtaataccctgtcaaatcaacaaattcttcagtcactttaattattatctcgtttgaaatagtaatagatggttttggattgttcttactattaagtggcattgattcttcctccgtaaatataaactcttatagcatgtatggaatttccataatgcatataaaatataaattcttcaaatagaatacatttaatttattatatcatctatactattattaataaaataataacaataacccattttacacgttaataactctgaaatcacaaaaagccagtagaacaattaattatgtaaatagttctactagcttttcgtaatcttattaaatttctaaagagttattttcaagatcttagtcttatagttattacttaaggccttgttcgtaatcttcgatcatatgttttaccatataaccaccaacatatccattttgtcttgaagaaaggtttcctttatcaatgttttcataattatttaatccaacttctgaagcaacctcagcttttaatctgtttaatcctgcctttgcttctggtactaatgttctatttcttccactgttatttgatgacatatacatcaacctcccttaattaatataaattttgtttggcattaatatattaaccattatgacaaattataatctattaaaatactagcaaaaatagtactgatagcttgtattaaatatttttccctattgaagaattaaattgatatttataacttagacttatgcaataatccaccgaaatcataaatattttgattccgaaaagctataaaaatatcgctgaagggtctaagcagcaggttatatccaatttagcatgctccacctttcagtttgacaagctaaattggaacaacctacagctaagaccctttaacagctcagtttcaaatgttttcttcccaaatatatttataatttctagtgaatatatgaactcaaaattttagcaactttgcaaatatgttcgtctaatatgtcaaattcttgtttggaaaatctataaataaggttttcctattaacatattagtatatatatgctaacataatatacgttgtagtattaaatactttaatacaatatacttttgagacatgacaatattggaggcataataatggaattaaaacataaaacaaatacctataaaactttatttcattggcatagttttagattaagacttgttgttgaaggtattgggataggtattactgctggcctattgattgtactatatcgatatgcacttgaaaaagcaggaattcttttaaattatatttataaaagtatatcatcaaattatatacttgcacttccatggattttagcactaatagttataggctatattgttggattgatggttaaatatgagccaatgatcagtggaagcggtatacctcaggtagaaggagttttgcttagagaacttgatatgacatggtggaaagttatacttggaaaatttttaggcggagttctttccataggttctggtctctcattaggaagagaaggtccatctgttcaattaggagctgcagttggacaaggctttagtaaagtatttaggcgaataaagattgaagaaaaataccttattacaagtggcgctagtgctggattagctgctgcatttaatgcacctttagcaggagcaatgtttgcattagaagaagttcataaaaacttttcacctttagttttactttctgctctatcttctgcattatcagctgattttatagctagtgaattctttggattaaaacctgtttttgacttcaagaaattagattcaatacctctgaaattttatttttatataatattattgggtattattttaggactcctaggtgttctttttaataaactccttttaaaaactcaaagtctatatataaaacaaagatggcttaaaaaagaatttcgagtaataatacctctattaatttcagttttccttggacttttattgccacaagttttaggtggcggacatgaacttataagctcacttattactgaaaaatcacccttgatgattttaatcattatccttatagtaaagtttttatttacaatggcaagtttcggatcaggagcccctggcggaatttttcttccactacttactattggagctttaataggtaatatatatgggataatattagtacattttgcacatgttaatgatatttatatctctcagtttgtaattcttgcaatggctgggtatttcacagctgtagtaaaatcacctttaactggaatcatattaattactgagatgacaggttcttttaatcatttgctttctttagctgtagtctctattgctgcatatatagttgctgatattttagcatcaaaacctgtttatgaagcattgctcgaaaaatttctgcaaaatataggtgaacatatttctataggtaacaaaaagaataaatctatattagaattcccagtatgtatgggatcaaatttagatagcaagcagattaaagaagtaaaatggccctcttattgcttgctagttgcagttaaacgtggtgaagatgagataatacctaagggagacactactattttacctggtgactatctaattgtacttacaaacgaggataaagttactaaaataagtgataccttaataaccatgactgaatgtaatgaaatgcaaaaatttctttaatatgaaaaaagaggagaccaagatgagatgatttttaatcattttgggacatcctctttacttacaattaagtaactgctgcacttttctacactcttctagattaaatttaaaatatatgcttagattgaaaaacaattaatttccaaatctttatttagatgaaattcttacttatttaaatattttgttttctgccttattaactaaatacttgaaccaataagtgtattcttctggcctttctataatatccttcttaacttcattaatatcaacccacttaaaatcatctacttcatctttatttacaatcacttctccatcatatttcccaatgaatacatgatcatattcattttcaaaaagatcatattcaagttttactttataaataaaactaaatacttcttcaagttcacatgtaaatcccatttcctccctaagccttctataaatcgcatcatgtaaactttcaccgtatcttggatgactacagcacgtatttgtccagaggccagacgaatgatatttttttacatttcttttctgtaataataattgatttttagaattaaatactaatatagaaaaagctctatgtaatgttcctttacggtgagcctccattttttcaattgaacctatttctttatcaaactcatctacagctattatattttctgccatttaatttccccttccatttatgctactacaataatcaaaactcatgctattaaatagattgtatctgtcatataaatcttagattattattttcattttacagatagcctataatatgtatcttaaattaattatataccataatggctaaattattttacatgtatccatatctataagacttctacataaaaaactatactaggaatagcccctaatatagttttttataaaattcatattctgacttaccaatttatttcaagtcctacacctacttctctaataggtgtggatttatgtatttctgccttaacaataaatgaagtacaatggcatggatacaattcttttatattattttcttttaaataatctatagttttattcacttgttcatttacttcaaataaatgaaatccccctattattcccaatactctagtatcattacatacttgttttgcatattctactatattgcatatgccactatgggaacaccctgtaataatatagattcccttgtcacttttatatacaagtgctgtatcatccattacataatcatcggtaactgtttctacattaatttgcttaccaataggcttcctattttcaaaattatttatcgcaggtatttcacctaagaaaattatatttttgcttacttttttaggttttctcgaaagaattaatttgcatttttcttttagctctttttctaaaattggagaacatatctttaaattcccaattaccttttctttaaatgcatctggatgagcaactatattaacgtgagttcgatggaaaaatttaagggataaaaaatcccatcaaaatgttttattatataagtgcgaccaaataaataaaacaaaggatgggattttatgcaaaacttattagtagaaatattttatgatgtagacaatttttgtattggatttgaaaattactgtaaaagtcatttcctaacggaaaatagcgaccgcaaatttgcaatgattaaaagtaaaactttatcattaagcgaagttatgacaataactatctactttcatttgtcaaattacagaacttttaaatcatattatattgagcatgtgtctactgttctcaaaccgtattttcctaagcttgtgagctacaataggtttgttgaattaatgcaacaatcattagttgcactactattatacatgatgaaatttagaactggcaagtgcacaggaatttcttttatcgattctacaactttgaatgtatgccataatagaagaatacactctcataaggtttttaaaggaattgcagaacgtggtaaaagttcaacgggctggttttatggttttaagcttcatcttgttgttaacgataaaggggatattctctctttttatctaactccgggaaatgtagatgatagagaaattaagactatagaaatattagcaaaagatttatttggaaaactttttggtgacaaaggttatttatctaaaaagatctccgatattttgtattccaaaggtattcagcttataacaaagataaagaaaaacatgaaaaataaattaatgttaatggaggataaaattcttcttaggaaaagagctatcattgaaacaataaatgaccaactaaaaaatatatgtcagatagagcataatcgacatagaagttttactaattttgcggttaatatagtttcaggattgatttcgtatagttttcttcctaagaaaccttctcttaagttggacaaatatctaactatggaataattggaatatcgaaccacaagattacaaggatacttttttgctttttttcataaccatatttacccataaaatattctagcttttcgaactcacgttatattaatattgcttatactattttgctcaaaataatattgtaatccctttgtatgatcatcatgtccatgtgaaattacaataacatctatatcttttaaatctaaaccaaacttatatgaatttttgataaatagatcagagtatcccacatctaatagtagttttgtattttcatcttcaatatagtatgaaacagccggctctccacagtagtactgatcaatatatgtattattatctaccaaaacttttaacttcaatcacacatctcccccaatttaatataactatttatacacattaaattcttattttttctatctttccaatcaatttaatttaataattcatataactccaccacttatttctcacttaatcattacatattttttaaatattatatccttcgattattgaattataagtgttttaactatgatcattaactctaaataacgtatattctatgcgtcaattaatttcttaatttcatttaataaaacaggaaatttagtatacccatcacgagcgataaaatgctttcctgactcaagaataataagatttgcgtctaactcttctgctagtttttgtgttgcctctgttggcacaatgtcatcatctgttgcagtaataactattctctttggaattaaagtttttattttagcaacattaagtggactatctacaaattcttgaataccttctgtttgttcatccataggatttttatttatgaaacctgcgacaagtattgcaccttttattcttacgtttttttctagaatatagcgcagtactgtaatacatccaaggctgtgaccaattaatatcgtatcttcatcaatatccataatacatttatgaagatgattaagccaaggttcaagatgtggatctcctgaatcaggcatatccggaacattaaccttaatggagctatctttaaactgttctttcaaccatggaaaccactcggatttactggaagatgtataaccatgaataacatatatattaatggctttcattttataatttctccttatataaatattatttaattaatgctattgcttactagacattgatgtatcctttcaggtacaaaacagcctcacccgatatttccactttatcatttaaatctctgcaatataagattccgcttctattagataattgacgtgctacaaatttatctttattaagaatttttctccaatatggtattaatgtacaatgtgctgaaccagttactgggtcttcacttattgcagaatttggaataaaatatcttgatacaaaatccacatcacttccttttgcagtaactattattccaaatgcatttatttcttttaacttttgcatattggggttaatattgcgaatatcttcctctttttcaaaaaccgccatatagtctcttgatttatataattcaaaaggcttctttcctaacgcctccacaaattcctttgtaacatcacacttttttccttccctcgatggaaatatcatactgagcagtgtattcttcttaactacttttaatactccactttttgtattaaaacttatatcatttaaatccttttctaaatattcaaatataacataagcagcagctagtgtagcatgaccacataaatctatttcaaactctggtgtaaaccaccttaattcatataaatcccctttcttaataaagaaggcagtctctgacaaattattctccctagcaattttttgcattatagtgtcatcaatccattgctctaatggacatactgctgctggatttcctctaaataattcatttgtaaatgcatcaatttggtaaattggtattctcatttatatctcctcattaaattcaaattcatttatagctcaaattcacaactatttctaaatccctctcacaaaagacataaattttctataaatgaacacgtaatgtaacttatttagctcattcttctaatagtttcatccatggaaatatattctgcatatcttccattccatataaattcattgtagtattcatatgtttgttctgctgacatgaatttattgtcaacagttgtgtttgcataagcagggactatcatattgaagccatgctcaaatccacattttattgtggcatcaacacatagatctgtttgaattcctacaattattatatctttttcgtctttatccattaaatattctaataagcctgtccctttaaaagcactatttacttttttatcaaatattttttcgtcattaattggttgaaatttttcatatatttcaaaaccgtcagttccttttgttaattcgctcccaggtccatcatcatgacgtatatatattatttcaatatcatttttccttgcttcactgattattttttctacattcgatacaaatgcattaaagttatataatttttcgtttgttattaatttttgtgtatcaacaactaataaaaccatttttattctccttttataaattactattttcctttattccaattataaaaatcttttaaatcttctttacgtttctgtgataactctgttttcttaacaccatgaatagcaccttccagggccagcaatctgtggatacatgccgaaggatcaatttcttgtatcttaagccatgtctgctctgctccaattgcttttaattcatcataagtaaatattcctacttcgtttaactgcctttccacttctttgccgatattaggtagctttgataattctcccacgataaaacttcctctcaaatctgattaataaaaatcaaatacattttaaagaaacctagataattttttctatttttaagtatatcaaaaagcttaacatatttcatctgattttataaccggcctcacatattttttgaatctgcttttttgaaccacattagaaaaatttagaaactaaatatattttctcttaagatgtaaacttctagttccttcttttcgtaatttatacattcaccacaatatctgctgatttcacttcaatatagactcctagagaataaaaaagaaagagaatcttacctgttatagcttgattccccttcattacttaagtaaattatcaatttatcctgtacctagttccataacatcatcccatgtattagaatataaattctaatattcttaagaatgtatattgtttagaatattaccatatttattcttcagaatatgcgctatttaactatgttctgcaattattattaaatctaatatcgactataaaattaaatcatctaaaaattatgttccttttaaaaatacatttgtcctatgctatatagataaactaatcatgaacatatttacaaagttgctgaaaatttaagtttatatcttcactagaaatcataaataaatttgtgatttctgtaagctaccacggatatctatattaatgactatcttaaaagaattttattttatcttccactttgaactttcctgctgcaattctaccatctttgcataaattcccttttgttttaataattctgatggggttccttgctctgctacatatccatcgtttaatacaactatcttatctgcacctgatattgttcgcattctatgagcaataacaagtactgttttatctttaatgaggtttgaaagtgccttttgtatctttgtctcattttccacatcaagagaggctgttgcttcatctaataaaattacaggagcattttttaacaaagctcttgcaatagaaattctttggcgctctcctcctgataaagttgaaccattttctcctatcaccgtattatatccatctggcatcctttttataaaatcatcgcagcatgccgccttagctgccgctattacttctttgtctgttgcattacgtttccccaaacgaatattattcataattgtatcattgaaaagtatgacatcttgaaacactatagaataatttttaagaagtacttctggatccacagaatttatatttactccaccaagagttatgcttccttcagtaacatcccaaaatcttgctgctaactttgctgctgtactttttccgcctcctgataaacctactaaagcagttatttgtccctgcttcgcagtaaaagatacatcttttaagactttctcattatttttattatcatatgaaaatgctacatgattgaaaattatatcataaccctttgttttgcatatctctgatccaaattgaactggatgatcttgcatcttcttcattctttctattttaaggcttgatgaaaatatatctgcaagattcattaatgaatcgcaaattgggtcataaaatcttgaagcagcaatcaaaaatactaaatatataaataaatccgtctttccttttgcaagaagagttccacctattaaaattactgtggcaaagccaacttttagaagcatctgtccgctaactaccataattcctgtagtaagctcatttctaacttgtatcttttcagcattatctataatattatctaactttaaaagatattctttttcttgattataagcttttaaatcctttatagtctctaaacattcctgtattccatcagcaacttttcgtttcgcagcgatattttttatgctaaatttattttgcagtttcttcgagcaaatgacgattaaaaacgatataggagctacccacaaaagtgcaattccaatgcgccaatcaaaaatcaacattcctattccaacaagtattgtagatacaatagcaccaataaactggggtattgcatgagagaatacatgctctaaatctgtacaatctaccataattgaatttgttaaatcagataagtctctccttccaaaaaatgataaaggaagctttcttaatctttcagctaagtttattcttctgttagcactttcaccataaactgcaataaatgaagatttgtattgcatccaatttacagcaaacaatataactaatgttataagaatcattataatatatttggacagttgtaaattaatgtttataccatctgtaattggagctaacatatctctaataaccataacaactagccccactggaatcatcaaagcaatatctgacaatgtactaaaaagtattccctgcagtaaatcttttgcgccttgcttggtcaatgcaaatctatcacatagtatattaatcatataagaacctccttgtcattacctttacctaacctcttacttttcttaaagtagccatcgttaatctcatctaatttctttgttactttccatgaaatagatctgcagtactctttccacatattagcatatataccgttctcttttaataattcttcatgctttccttgttcttttatccttccatctgacataactaatattttatcagctccacatatagtagataatctatgagctatcataagcactgtttttcctttagtaagtttttcgaaagccttttgtatttgactctcattctcaggatctgcaaatgctgtagcctcgtctaatattacaatctgcgaatcttttaatatagccctagccaaagctattctctgacactctccaccagataaatatattccttttccaccaattaccgtattaatgccttccggaaatttttctataatatctgtgcattgtgcttctctaactgcttcaagtacctcgtctatggttgcttttggttttgctattctaatattttctaagatacttgcttttaagagccttgtattttgaaatacaaaagaaactttgtccattaaatccttttttaaaacatcacgaacatcaacaccatctattttaacgctcccattattaacatcgaaaaatcttggtattaagcttgctaccgtactttttccaccacctgatgcccctactaatgctatagtttcaccttcattaatagtaaaacttatatcatctactgtaggcgacgtatttcctggataagtgaacgtaacatgttcaaatgaaactcttcttccatttattttttttggatcttctggctcttttaaaggcttttcatccaaaataacatcaatccttttaactgcctccttagccaccataatgttttccattatcttcattatcttggttaacatattaacacttactggtgtaaataatacataaaatataaaatcaagtaaaaaacctttataatctgatgtatttttaataacgagaattccaactggtatcaaaaatgcaaaagccccattgacagctactgtaaagatagtcataggaatctgacactcagcagcataactagatgcaaatttactatatttattaattgaatcgtggaaactcttaaaagaaaatacagtttgttgaaatacttttactactggaattcctctgatatattccacagcttcattggacatttcctcaagagcattttgatatttttctatagaatctgctttctctccccccatcaattttttcaagcaaagaacacctattactgtaggaattaggcacactgctccaagtctccaatcaaaaataaacagtaaaacaaatattgcaattggtgatactatcgctcctgctaaatctggaagctgatgagctaaaaatgtctctgttaaacctgcattatcatcaataacctttcggagcttcccagtattgttgcttgaaaaaaatcctaatggaagttttactatatgatgaatagccttaattctcatgttccttgcaatcctaaatgcagaaacatgtgaacacataagtgctataaaatatattaacatacttactacagctaaaaatacagcacaccatccataaaatgaaagttccataacattaggtgctttcggaagtgacgtaataatctctcttgctacaaaccataaacagacaaatggtcctaatgctagaacagcacttatagcggacaaaacaaatgccagcaaagttaaaaatttatactttccagcgaactccatcattctggaaagtccttctttcttttcaatcatttaaattcctcttttctgctacataatttcttcaaaataacattgattatgatacgtaccattttacaatttactgtaaatcagcactcctttataaaatagtgatttagattattatttctgtgccatttaaatctataaagttaaattttcaaatgcatccatatctccttttctatattctgttggatttaccccaattgcttccttaaaagctgctgcaaatttgctttggttttcatatccaactgttgctgatatattcataacagtttcatcagtttttctaagcaaagatgcagcatattcaattcgatactcctttatatattttgcaatgcttttaccataaatagctttaaagcaactgctaagccctgattgacttatattatatttttctgccaactgcttaagtgtaagattattcgatagatttttaataagctcatcatgaacatttttcacaatttcagtttgtgcttttaaataatatttatttttagcttcattttcattggcacagttctcatttaaaagcaaaataagttctaacactttaatctttaaatagctttctatagctgcttctggcaaatcgggtaaactaaataaatcaagaaaaattctttctatcttcccccctacccaattaatgcagtttccaacctttacataatatttttctgaagaaaacaacctcttctgaaaagtctttatgtcaatcatggccccttttaaaatttcgggtaaacacttagaaagttcatcaatataaatgtatatagaaattcctttatactctgccattggaaaagtattaaccggaggatactttcccataagccctgcatatagatcaccacttcccatatatacacatacacctccctcaaattcacattgaatacgtccttcatggcaatatcctatttcaatcatttccccacttatttttggcattacttgttcatttgcgaataatgataactctttacacttaaactcttcatagtttagtacaattccaggaaatatttcatgcatgcaaatgctaccacaccctgggatatctattctctccaaagtaattcacctcttatctttataatttaaagaattcagctcagttagtctcaactaactatactgaattatactatattccatttttttcttacaagcccaaaacattatatttagctccaaaacacaattgaattttataaaaaaagaaatattgtacggctacttaaaatagttgtacaatatttctcaattccattaaataaattttaaactttaattattaatattagaacacttgtattctagtattttttttaaggcagttccactgctctgatgacatcgtattaattcagcttcatttgtatcagtattagataacacgcattgtatcattttatgagatacagtatttgtgaacaatacaagtaggtcaggctttccaatttgctttttcagattactttgcatttgagtaaagaccttcgctttacaattataattcttacatatttttttgtattcacaaaccattctatcatggccaccaattataacaatactcatttctcttctccacctctcttatataactatagaataatatttttaagcgaatttactttttagaaattcacagatataatttcatttaactattatgttttatttgatgatatatattgcaattcacaacacacacttcacaattcgcaattacggctaaaattcttgcaatatttttgaaattgtgatgaagcattattttttcaacatatatattaaaaaatcttaaagttcatatattttataattacttaatattctatttacagttagtctcaactaactcaatattatatttatataatgcccctatttcacaataacatgcatgataaaatcatcacagaaattcaaaacaattgcactactggataataaaacagctttagttagtcttaactaactaatatcagtttaatatattctagtaagattgtccagtgcattaattacttttctcataaaattacatatgatatatatcctgtgatgcgtattatatcttaagtccgctgccttttctaaaaatacttgcatattttatattctcatcacaatgattttcatatatgctattcttcctctaaatttgatgttaaatatgcattatgatatacttacttcattaaaatttaaatttcattacatagattttattgaaagagggtctttatatggctataaatgaatcagtcgaaaactatttagaaacaattttaattttaagccaaaaatcacatgcagtccgttctattgatgttgctacagagcttaattttaaaaaatccagtgtaagcgttgctatgaaaaatcttcgcgaaaaagaatatatatctataacagatgatggaaatatagttcttactgacgcgggtaaagaaatagcaaatatggtctatgaaaagcatacttttctttctaactggttaaaatctattggtgtagatgagaaaattgctgttgaagatgcatgtagaattgaacatgttataagcaatgagagttttgaggctatgaagaaatatgtaaataaaaatacttaaataatagataatcaaaaagtggagagcccttgctccccactttaataaatttaaattgatttaactaaagctccacaatctttgttgcaacatttttacaaaactcactgtcatgctctacaaataatagtgttggtgaatattcaagtaacaactcttctatctgcatacgagagataacatcaatgaaattaaggggttcatcccaaatatgcaagtgagctttttcacaaagactttttgcaatcagtacttttttcttttgcccaccactaaaggatgatatatccttctcaaattgctctcttgaaaaatctagttttctcaaaattgctttaaaaagactttcatcaatgctgttttcaagagcatagttagtcaaatttcccttaagataagaggtatcctgtgacacgtatgatatttttagtccgctgccttttctgaaagtacctgtatattttatattctcatcacaaataagcttgataatacttgattttccacttccatttttacctttaagtgaaattcgttcaccttgttcaatgcttaaattgatatctttacaaactattgtatctccatgaaatatcgatacattttcgagttccaaaagcttatttttatgataggcaagctgagagattttcaagctgtccgaactttcaatattttttaaaagcttagatttttcttcaattgaagtctcccgtctattttcaattgatttggaacgcttcatcattttagcagctttatgaccaacatagcctttatcaagcttagagccagagttagttgttcctttttttgatttttccacttcacttgaccaactactagttcgcttagcagattctgataaacgattaatgtctctcctaagtttttcgttttctgctagctcatatccatcctgtctctttctgttttcccaccaacttgagaaatcacctttctgtatttctatattggtcttatttattgagagaacatgatcaatacaattatctaaaaaggccctatcatgtgaaatcaaaataaatcctttcttttttcttaaataattactaagtttttttctagcctcagcatccaaatgatttgtaggttcatcaataagcaaaaacgaattttccttcaaaaacatagctactaacaatgccttggtctgctctccttttgatagagtgtaaaattgtctgtatagaacatcgtcgtctatatctagcatcgatagttctttcattatttcccaatctattgaattttggctaatttcctttataatatctattgtaaaattttcttgttcttctacctcatatggaaagtattcaaaatttacgttggttgatatatttccagtatattcgtattttccaagtaaaagattaaaaaaagtagtctttcctcgtccattccttcccgtaaatcccaatttccaatcagtatcaatctggaaactagcattttcaaaaatagtatcgtaatttccatcataagagaaggtaaggtttgtaacatttattaaagacatgcatttgtcctcctttgtaattagtttattattaatctaaaataacaaagtcggaaaattaggcgactgcttctacttcatataaatataaccgtcgcttgaagtatccggctttatatgaagattgtcatgtgttaggtttgtatctttattttccatgatacttttcacctccttatatcgtagtttagaaaaaaataagagctgcaagaaattattatccttacagctcataaatacacatagtttagctaatttatatagcataacataaaatatatattaagagaaaatagaataactttcttgcatatgtacaacaaaataaacagagtccactcattcactcctctattatattgcactttaaaaattagcaagaaaatttaatcatcatttcacctcaaatttcaaatttaatgatattgtaccaccatgaataaaaaaaatcaatataagatattcctatatattttttataagttcaaggaattctcaaaaatacaaagtaaatttcttgttctattatcgctttaaattaactgatttttggaaagtagctttttagggattaaccactcaagaaccctcacattataaaaacctctatagcaaaaattcattactataaactttaaaatgtagcaactattttatcatttttctcacctgtttttatatatatatgttacaattcacaattacatctataattcttgtaatatttttagaattatgatgaagaattatttttgcaatatacatattttttaatattttcagactatagaacaaaatcgcagactactttggatctggagatttcttacatatcaacctctgataggcgaatatattttcttttttattctcctctaaaacataatcttctaaatcagccttttccataatttatacccacatggggtacaataccactgatttaattgtaatttcctgcgaaaattaaactatttttattatacttttctgaatacgtctgccttcatgggctcttcataaagaatcaaaaaagagttacaagaaaatcttataactcctaaaataatcaaaactatcttctattattttgttgttttctagctcttctacaatcaggacatctaactggttcgttgtcaaatcctttttctttgtagaattcttgttctccagttgtgaaaacaaattcatttccacaatctttacatactaaagttttatcttgcatattcaattcctccttctaaaattaaagattaatatcgattcatataattctctaaaaggagaaatccatactatctataaaaaacctttttctttttcttacaaaatttattataacagcttttattttaaatagcaaccttttatttcattaattgcttaattttttatatctgtaatttatgaatggttaaactataaaaaaagattgtaagataactcttaatataatacttataactagcactttaaacattcataaatctactgtagtatacactacatttcacttaaagtatagtgtttttatatggaaatatagatatccaaatttaaaactaaacttatgtggtaacttaccgaaatcataaatattttgttccgaaaagctatgaaaatatcgctgaaggttctaagcagcaggttgtatccaatttagcatgctccaactttcagtttgacaagctaaattggaacaacctacagctaagaacctttaacagctcattttcaaatgttttcttcacaaatatatttatgatttctagtgaagatatgaactcaaagttttagaaaatttgtaaatatgttcatctaataagtctaattcttgaattggatatctataccatgaaaaatttaatttgttttcttaatatagagaatcttaaattttaaatttcttcgatactaattactttttcttcaccgctaatcatatcttttattttaacttgtttacttattacttcatcttcacctattaatatcactttctgtatccccaatttattagcatagttaagttttttctttaatttatcatcttcaagatatatttctacatatttttctttatcaattaattttttatatatctcagtgcaatattcaagtgtatcaccaattggtattattaaatattccattgatttttctatcttgtagctattaagaaatcctatttcttttaatacaaaaaataatctcgtaagaccgatggatatacctactccaggtaatactttatctgtgtaattttgtgctaagttatcatatcttccacctgaacatatagagccatatttttcattctccattaaaaatgtttcaaatactgtccctgtataataatcaagtcctcttattatttttaagttaattacatattcattatcttctacaccaaaaagcctaagcatttttttaactgcttcaagttcttccaaacctttttgaaactcctctgaattgaaatttaacttctttagttgttctaatatactttcattacttccatctaaatttatgattttattaataacatctgccttttccactccaattaattcatttaatgatttcttaaactcctcatctcctattttgtcgtatttatcaattaatattagaacttcagttgcattaccaatccctaaactatttaaaatagctgataatatctttctattgcttatttgaaatttatatttttttaaaccgatagccttaaatcctttagaaaccatactgattacaaatgcatcattattaatactgagcttgttattacctataatatcaatatcacactgataaaattctctgtatcttcctctctgatttctttcgcctctatatacctttccaatttgatatcttttaaatgggaatgttaattcattaaaatactgtgatgaatatctcgcaaacggcactgtcaaatcaaatctcaaagataaatcattacttcccttattgaatctataaacttgtttttctgtctctcctgcacttttagctaataatacctcagacttttcaatgactggagtatcaatttctaagaatccattttcttcatatactttagttatttttcttactatgtctttaaatatttgttgctccttaggcaatagctccataaatcctggtaatatacttggttgtattttattgttcttcataatcttaatctccttctaaataataatttttatatttgacaagtaaattgttttatattttgctttaaatgacaaaaagccatgcaggcatatatcctacatggcttaacaaattattactgacatttaatttatcatcaccagcagatacaagcctacgaattatagacttgtatctgccgctttaacagaccaagtcttactggtgatgatgtatgaagtttattgttttcatcttaaatgctttcataatattttctcctaaattttaatttctattattatacaatatgctaatcttattttcaatagtaattttaccgtttccaactggtttttaatactataataatcattcaaagtgataaacttcctgtcataaactaacgaaatcaagacaaaatatatttgttaggtaaattaagtttatctaaattttactagtttataaaaagtgaaaggggaacataaattatggttagaaatgcatacgacgttaaaggtctaaagatactaaattcagatgattcagtgcaaaattctgttagtagtgtttactctggcagtgctaaaaagtctgcttctaaaaaaggcaatatgacaagttcttcagattcatcagatagttcaaagtaaaactaattgtattaaagttcaagcatatatataattcaactaagacctgaacttatgcatataacttgccgaaatgaataacatacttttattccagtttctaggtaattatgacgggtgattctaaggctataaagttgcacccaaagtgctagcctcaaagaacaagctttgaactagcacatttggaacaacttatagccaaagaatcacatccatcaaaattaccaatgaaacattccacaaaagtatattattcatttctagttggggtatatttcatagtataaatctaacttataattagcttatctataaatatcaaactttataactagatttatgtggtaacttaccgaaatcataaatattttgattctgaaaagcttgaaaatatatttatgatttctaatgaagatataaatttaaagttttataaactttgtaaatttatctaataagttgaaatcttaagttgtgtatctataataattcaaataaaattccactccataaaaatgccccatagaaacttcattattataatacataaattgtcaaatgaagtttctatgggttatatacaatataatttagttttttctcaccattcataggcttccaaatgttaatttaagctagcctaataactttttactccctttgccctctacttctaccttactttgataagcttttccaattcccttgtattctctaatcatcataataccagttacaataaatacaattccatcagttataggaacagctgcccatacaccttcaatccccattaacattggtaatataataataagtggaacaattaatgcaatttgtcttaatataactaatatgcttgcattttttccttttcctattgattgaaatgctgttaccgacataatccaaaagcctaaaaccggaaacataatatacatcactctaaaattatttattccttcataaacaattgaaccatcttttataaataatgaaaggatttctttggggataagctgaatcggtatccagaaacataaggctagaattgttgcacaagctacaaatacgtttatacttttctttactctgtcatactgttttgctccataattggtaccaacaactggctgtaagccctgccccattccccatagtggaataaatgaaaatgctaatacacgtaatgcagctcctattaaaataatttctgaatctcctccataagtagaagccatcttataaatcactacttgttgtataaacatcattatttgcattaacatggctgaaaatccaattgaaaatatttctggaagcaagtcaaattcgattttaaatccatgaaagcggatattttcactttcttttataaaataaaccatcgtaataacagcttgtataatttgcgacaataaagttgcaactgctgacccttctacttggtgattaaacaatataatcataataggtgcaaggataatgttagttattgctccaatcgccataaaaatcatagcttttttcatacgtccctcagcacgcataatcatattagcactttgagcaaagtttataaaaaatgagcctataaatactattcgcatatatcgcactgctaaatccaatatttctccatttgccccactaattaagagaacttctcgtgcaaataccactcctattacagttacaattgctgaaagaataagtataagtaccaataaatttcccattattttatttataatatcactatcttttttcccaatagctctagacaaaacggatgcagatcccataccgattaaagttgaaatcccactatttattaaagtaaaaggatacgctacagatactgcccccatagcatttgtcccaatcatttgccctgcataaatagcatccacaaatgaatataatccaattacaagcattccaagtactgcaggtacacaaagctttatcataagtgcaactggctcctttgttaacaattcttctctcatatcattcaattataattcctccattcattactacaataatatatcttagaaatcctttagggatttcatcatctcatccaataattattaattctaaatgtggatttgcgccatttactgtgccaagctccactcctctgcttttttcctaatatttatgaatctattataaagcccctcttgattaattaactgcttatgtgttcctttttgaattactttcccatcactaattactaaaatctgatctgcattttgaattgttgcaagacgatgtgcaataattataatagtttttccattagttaaagcattaatagcttcttgaatgtaatgctcattttctggatcaacacttgctgtagcttcatcaagaataataataggtgcatcctttaaaattgctcttgcaattgaaatacgttgtttttgacctcctgataaagacgctcctccttctccaacaaccgtgttatatttatctggaaattccattataaaatcatggcagcgtgcttttttagctgctattatcacttcttcaattgatgcagatggatttccaaaactgatattattcaaaatggtatcttgaaacaaatatactttttgaaataccatacttatattagataataagctatcgcaggtaatatcccttacgtttactcctcctatgcttacagctccctgctgtacatcataaaatcttgcaatcaaactacatattgtggattttccacctcctgatgtaccgacaattgcagttgttgtattttcaggaataaaaaatgacacatcttgaagaacattttttttatcatatgcaaaactaaccttatcaaaacatatatcataggaatctaatactacaggcttactatttttatcaataggttctacatttttaacctcatctacacgatcaagagatgcatcaatcattcgtatcatatttgaagaatttccaatctgctcaacatgaccatagattataaatgaaaaagtaatcatcataagcatagtagatacttccatagaaccatttatagcaaatattgcagatgcaaaaattatacctacagatgcaagtttaaagataaatatataaaaagatgtcactggcacaaattcctgctctattccatagtttgttttacggcttttttcaaatgcattttctatactctctttagcaatcccatcctgtttaaaagcttttacaattgatatacctctgatatattcaattatggccgttactaatccagcttgatttgcttgacgtattggagctacaattctgctccttttgcttatataaatcattactaaagatgttaagattattcctccaagggtgattaagccaattctaaaatcaaaaaacattaagcataatgagattgtaattgaactaatatacccatttacgactttattaattagtttcattgcgttattttcaacaaacgaaagatctgttgttacagaagaagtaatttctcccgtatctttctcaccaaaaaagcccattggaactcgctttaaggcatcaccaattttaagacgctgctctgcaaacacttcataccctatgctttcttgtgaagtagctactaaatatgaaaacaacattctgcctaagaccgcaaaaatcatatatcctaagcaaaaccatacttgattaattgttataaccgttataccttcaatgttttcaataattaatttcaaaacatatgaagctccaagaactggcaaagtcgagaataatgcctgcattaatgcataaacaaagctgatatacatacgtttagaattatcaccagataaatcaatgatccttttaactacctttaacatccaactacccccttattcaaattctgatttctagttaattcttttcctgctgcccactttttagaattaatatgagcattccacatatcgcaatataatgtacactctttaagaaggtttttatgagtcccattcattacaacttttccattttccagaaccacaatattatctgcatcttttactgttgaaagacgatgggctattacaagaagagttttacccctggttaattcagaaatagacctctgtaacttatcttcattttctggatccgtaaaagcagttgcttcatctaatataacaataggtgcattttttaaaatagctcttgcaatagcaatacgctgacgttctcctcctgataattttccgcctgcatcaccaacatttgttttatatccgtaatctaatttgctgataaactcatcgcagcaagctagttttgctgcttcaaaaacttcttcatctgacgccgatggatttccaagacgtatattttctaatatcgaataattaaacaaaaaattatcttgagttacaaaactaactatatccatgagctgttctaaaggtatatcacataaattaataccgccaattgtaatttctcctgctttaacatcccaaaatctagcaataagtcttgctactgtggattttccaccacctgatggacctacaagcgcagtaaattttccttggggcaaagttatgcttacattatctaaaacattattttctttactctcatcataagaaaaagatacatttttcatctcaacatcataatttttaaatgttacctctttagttgttgattctaattcttttaattctaaaagatcatttgttgcctgcactgcataattaataatctgcatttcatttataaaatctgataattttaaaataggttcaataattccaagtgagagaattatacaaattgcaaaagatgatgctgttatttctttttccatgtaaagatataaacctataggcagtactcctagcaaggttgacggtaaaattgctgctgcagaagatgtgtatttccaagtactcttaaaccaatccaatgtataatccctaaacgatataacagcatttttatacttttcatatgaacttgtagattgattaaatgctttaattacctctattccttctatatactctacaatagtagaattcatataattatttgcttccatgtacttatcatattttttcttataactcttcatcaccattagatatggcatcattccaagaggaattgttataagtgctgctaatgccatacgccaatcaatataagttatatagataaaaattcctattggaattaacatatttgaagtaaattcaggaatcatatgtgcaagcggtgtttccattttttcaatttcatctaccataacatttttcagcttaccaactgtttctcccattacactcccaaggggtgcatacataagcttagttgaaactttccttctcatattttttaatatatgaaacgcagaattatgagataataatgttgatattgtgaacaaaaagattttcataaaatatcctaagagacatattgctgaccaaaataaaatattttcaaatgtcttagtatcgttgaagaacataacgattatattagcaactccaaaatacggcaccattcctgcagcaacacttgctattccacaagcaacagataatatcattaagtgtttatgttcctttgctaaggataaaataatagaaatccatgatttttctttcatataagctcctcttttctttaatacttaaaacctatttcatagtattaacttttaattaataattttttatatcctaaattcacatatataatttttataaaagcatatccattttagacacacatacttgttaaataaaatcatttttgatatcatttaagtgtaatatattactttctatccaataattatgatatattatcgagttataaccggtcaatcaatttggcagtgttcgtctcttcatgatacaactttgtcttatcgtgctattactgtaaaaggagaatttatatgaaaaatattttaaaggaattacatgaaccatgtctcaatcaatatggttttgaaagagttgaaaatgcagaaggctttaatgatataggaatatgttataaagtctcgtctgatataggcaaaggttattattgggtttatgcaaaagaaaatcttttttctatatcaatccatgatcttgttttatatgaagattattttatgaaataccagcagccaagatatctcagtataagttattatgattctgtctctggagaagagttaaaaccttataagcgaattaatgctaattgtatacgcagccgcatctctgaaaatgatttatatcaggctatataccataaaagcatccccattagttctatagatatcgatatttcgcctgattattatgaagaatatttaaataataaatatccaaaaggcttccaaaattcaaaaaatgcatttttaagtattgatggtctaacagattttccagaattaatattttctcttaggcaaataagaaattttaaaggttgcggggatgttgccgccctttattatgaaagtaaagtagccgaaatcatctcattaattgctgaaaaaagcaaatctttaaatgacttaaaaatggacaaaaccttatcaaagcaggatattgaaagattagaatctgcacgttcatatattgatgatcattttgcctttgaaatttatttggaggacttggccaaaattgcttatatgggcacaaccaaattaaaatattcgtttaaaaaagcataccattgtacaattacagaatatattcaaaacaaaagaatggcacaagctgaacatttactcagcaacactgattttacaataagtcagattgcacaaattgtcggctataatcattttggacgtttctctaatttatttaagcgttctactggtttactgccttctgaataccgaaaactagtaacaaaaagttaaaaatataatgctgctgcttaaaaatattctctttaagggtgcagcagcatttttatttatagataaacaactgatatttctttatctgtgaaattcacgaaaataaacacacttaaataagccttataaaaaggccctgtattttatattattgttaaaaaaaagctatggtatgtatgcaaaagatgttggtaaaatatattaaaaattgacaacatcttttaatacatctaagaggcttttgggaagatacaaagatgaatgaggcactgggaataaagcaccatgactaagcattatgaataaatcattcgtaattaatatttaatggaagttttaattaacaaaatttttgatcaattacaggtctgaattactctgtcacatgtgatttctaaaaactcttcatcgtgagttactatgaatataatatgcccctcttttgataaacttttaataagcctgctgaccgtacacatattttcataatccaagccacttgtaggttcatcaaaaatcaaaatcttcttatctgctaatatacccgtaacaatagcaagccgctgtttttgcccgcctgataatgccatagggtgattttctttatacatctccaaattaaattcttttaataaacttaatactctattatcttctactttcttttttgataacttacattcatcccatacactttctgcaaaaagctgatgatttacatcctgcataatcatataacaaactttgtttcttttttttggagataaaaagatttcattgagctttatctttccatcaccttctttaattaaacctgctaaacacctcatcaatgttgtttttccaactccattattgcccaataccccaataacttcgccttccgctgctgaaaaattcatatctttaaaaatatactttttatcatttttatatgataatcccgatacgattaaatttggtttagctgtttttaaataatttgaaagtttagtcactattggctttattgtcctaagccccatttttattcgctgattttcatctaaatttaaaaattcttttcttttaaatacttgagagaccttaccatcttccatataaataaccttgtctattaagtccgctaagtaataaatccgatgttctgcaatgactattgtttttccgctttcttttatttttttaagttgtgctttcaatatttttatagcatttatatcaagattagctgatggttcgtccaaaacataaacctcaggattcattgcatatattgccgcaaaagcaagtgcttgtttttcaccgcctgacattttgaaaatatttcttcctaataacctgtttatttttaaatcactaatcgtgtctgaaatcctctttttaatatattctggttccatcccttcattttctaatccaaaagccaactcactatcagaatctatattaaaaaactgagatttaggattttgaaaaacagatcctatctttgaagataattcatacatttttgaatctgcaatatccattccagctgaaataacctttccttctaacacgccttctataaagtgtggaattaacccattaataacttttgttaatgttgtttttccacatccacttttaccacataacaaaacacattctcctgattcaatatggagatttatattttttagattgtatctgcttttttctgaatacttaaatgaaacattgttaatatctatcataaaatacctcccaaatggagcattgaacctgtgataaaaacaatccctaccccaatgcataaataatcttgcagatgaaaactcatatcaacagaacttgtttttggttttggattttcaattcctctagtgattgcagcagcgcttaattcttctaccgtattaaccgctgaaattaaaattggtacgtaaatacattctacttttcttcttaatcctcttacttctctcattttcattgcatctcttatatgcacgatttcctcttttatagctggaaaataacgtattgtaatggataatggaataatgaccttttgaggaatattccattttcttagtgataaaataatcaatcgtactggtactgtttttattattaattcacctatcatcatacacggaagaagttttctagcataaacagctaaaatcgaaaacatgattgctaaaaaagtcggcatgatctctattaaataatattgaatagctaataatattataaaaaatacacaccactttatggctgattttctgcatccacaaaaagataataatattgcaattgccattatttcagatgcctctatatatacaaaagaattcgtaaatgcgactatatttgcaataaatataagtaatatttccgtccttggatcaatactcaaatattttttccttagtctagacatatttaaataatacctgcctttataaaatgtttttttagcatgcttctgccaattatcccacctgctaaggctaatataaatgttgaaattatcattccaattaacattccagaagaagtgagattcctcaatccatctacgtaactactagacattccctgctcaattatagattcaaagaaaatatttccaaataaccaaattggaagtggtgaacctaccatccctagcgaaaacactgcgtatgctattaaatttcctgtaaaacttttatatccaaacatatatcgaattaattctgcaataatgcttgaacttgcaaaagttaataataataccactgtaaattgtcctgttgcaaaataaataattgctgtgattgctgccataatcactacaggtccaaatttttgaactttttctatcatcaacataaaaataaccccactaagaagtgcaatcaatgcaggcataaatatccatataatcggtgaaatcccgccacaaatcataataataagattaataacaaaataaattgcagaaaatacaccaatagtaactaagtctttaacttgtaatttactagtatctttttttaacatttttctttcctccctataccgtagaccattctaattttttaatattaaattaacttcatttaataacttaataaatcctgaacatttttgtaaacatcatataaaattgccttattttaatcctaactgctcaatatctttaataacaattttttttagattcatataaagattaaactccttgcaactactttttataattatgtattaaattctctataagtttgaatttgcatgaaataaatgttaaaatatacaaatgattcatttgattccttatttcaaatgataatgataattaattgttttgtcaaaatgtcttacaaaaggttatattcttaaggcatttaaatgaatcacttataaaataagcttttttaatactatccacatacaccagcgtgatattgagggataattataaataaaaaaaagatatattgggactttaatgtaatatttatatacttttagaatggagtgattaacttgaagaacaagaaccaaatagacacaatatatagaaaaggttatggcaatttagctgaacaactttcgtttaaaaagactactcaaaatgatgaacaaatttatgaagtaccaataaaaaatggaacaggttatatttatcaaataaatcctgctcctggggtttttatttctatgtgtgattgggtagcatataaaaaaatagagtatcattaccaagtaaatcaaacattcactgaaatctatttgctagaatcaggtaatatttctttagtaatgaacggtaaaaaaacatatacaataccgtctggtgtgaatgtttatataaataatatatctcaagggcgtatatgctacaaacctagtatcccaataaaatgcatatgcattttactttttgatgatttcataagaaataatattgggaataaatttatagataattatataaattttgagaaaacttttagttcaaaatctattaactataatactcctgaaataactctgctctttttacaaataaaacagaaactcttatgccgcgaaaaatcacgtttatattatgagagtaagattggtgagctattgtctataattagaagcaactttaataaagaagaagaacgactaaaatctattcacagtaaatttcctttaaatgaattaaaaagattggaactagtaaaattgatactcgatcaaaatatagccaatcctcctgaaattgatcaattatgtaaaatagctgctatgggtaaaacaaagttaagggaatcatttaaattattttttaatataacaatcgggggatatattcgtcaggttaaaatgaaacattcattaatactaatgtcaaacaatcagctatctattcaaaaaattgctgctagcttagggtattctagcacaagtaagttttctataggctttaaaaagatttatgggcaatctccttctgaatatcgtaaaaatattctcttaacttctcaagaatgattcttgtagttaaatctaatgaaaataacccacgaaagctaaaattgacatgatacctttataataatagtattcaaggtacattccaaattagattttcgtgggtctttttgttgtaagagaaagatatcaaaacctactcgcaagatttctcattacttacctacatctattaatcaattgatttaaatgagtataatttttagcaatcaatctataattgtatacataagctttttaagctcacctttatctctgccattcctttgagcataatcatcaaactgatcctgagctattttattaatgtcaaagtatttagcatctttatttccaaagtaaagaccacaggtacttgcagtaggtgacatcatatagctttcagtaagttttacattaagctctccttctttatcgagtaagttaaataatttaactttttctgaatgatctctaagtgaaggataaccaattgcaggtcttattcctctatacttacctttaaatatttcttcgatggataaattctcatctggcgagtatgcccaatattcttttctcactttttcatgaacatattctgcaaaggcttctgcaagtctatctgcaagtaaaataaccattgttgcaccataatcatcaccagaggctttaagcttatctgcgtattcttttgcgcctattcctcctgttgttatgaatgcacctatataatcctttatcccagtatctttaggagctatgaaatcagataagcacatatatgtattatcttttttctcttcttgctgtcttaaaagattaaagttaatcacttcagaatcgttataaacttcaatattatcccctactgaattagcttcgaagagaccaaaggctgcatttgcttttaaaatattttcattttccattttatcaagcattttttcagcatcagctaataactttttagcttcctcaccgtattttgcatcttcaaggatttgtggatatgtcattcccatatcccaagcaatgaagaaaaagctccaatctatatattttcttaattttcctatagggaaatcaataaatttctttattcctaacattttaggcttagctatttcttctttatcccattctttcttgaaattattttcccttgcataatctaaagtgacaaattttctaggtactttgttaaatgtttcccttaaagtttcatattctgattctattttattaagatattcagcttttttatccttatttaaaagaagtttagcagcttcaacagcttttgatgcatcagttgtatgaattactccaccagaatactttggtgcaattttaattgctgtatgagcctttgatgttgtagctccacctaccattagtggaattttaaagccttgcttttccatctcttctgccacatttgacatttcctctaaggatggtgttataagaccacttaaagcaataatatctgcattttcttttttagctgtctccaaaataacttctgtaggtaccattactccaagatcaataacttcaaagttattacatgaaagaactactgacacaatatttttacctatatcgtgaacatcaccttttacagtcgcaaaaactacttttccagcactaatgcttccactgctgcttttctcttcttcaagatatggcatcaagacttcaacagcttttttcattactcttgcgcttttaacaacttgaggtaaaaacatcttaccatcaccaaaaagtttacctacttcattcattccatccataagaggtccttctattacttctaaggatttgctatattctattcttacctcttctacgtcttctttaatatatttatctataccttttactagcgcagtctttaatctctctttgacattttcatttctccaagcttccttattttcttcagctttattatccactttattatagctagccgcaaattctaaaagctcatctgctgcattttcacttttattgaaaataactgcttccactttttcaagtaaagctttatcaatttcatcataaatttgtatcattccagggtttacgatccccatatccataccattctttatggcatgatataaaaatactgaatgcatagcttctcttattacattattacctctaaatgcaaaggaaagattacttacaccaccgcttacttttgcataaggtaaattttcttttatccatttagtcgcattaataaaatctactgcataattattatgttcctctattcctgtagcaattgttaaaatattagggtcaaatactatattttctggtggaaaattaacttcatttactaaaatatcataagctcttttacaaatacttatcttcttttcataggaatctgcctgcccattttcatcaaaagccataactacaacagctgctccaaaatctcttataatagacgcctgtctcttaaattcttcttcccctaccttaagacttatggaatttactattggttttccttgaagggctttaagtccagttacaagaacttcaaacttagaagaatctatcattactggaacctttgaaatttcaggctcacttgctaaaagctttaagaatttatccatctcttcttttgcatctaagagagcatcatcaaagttaatatcaactatttgtgctccattttcaacttggtctttagctatagataaagcttcttcataattcttttctctaattaatcttgcaaattttgctgaacctgctacgtttgttctttcaccaatattaataaagttattttccttatttgccctaagagcttctaaaccacaataaactgtttcagtttcaatgtctggtatctttctaggtggaatatcttttatagcttcacttactgcttttatatgatctggagttgtaccacagcaacctcctacaatgttaaggcatccatcctctgctaaactttttattaaagctgcagtttcttctggcttttcatcatattccccaaaagaatttggaagtcctgcattagggtaaacacttatgtatctattttgagttcttgaaagatattttacaaatggtatcaaatcttttgctccaaaagagcaattaagtcctattgcaattatactttcatctaccatagtatttgcaaaagcttctaaagtctgacctgaaagaattcttccacttttatctgcaatagtcccagatattattacaggtaagtccttgcctttttctaaaaatgcagactttgctcccataagtgctgctcttgcatttaatgcatcaaaaattgtttctatgagaattaaatctactcctccatctataagtcctaaaacttgttctttataagcttcaactaattcatcaaaacttatatttctataacctggattttcaacatcaggtgataaagatgccgttttatttgtaggtccaagtgatcctgctacaaaacgcggtttatctggattttctcctgtaaatttatctgcagcggctctagcaagctttgcaccttcaaaattaagttcatatattttatcttccatctcgtagtctttttgagagatactcgtactattaaatgtgttagtttcaattatatctgcaccagactccaaataggcttcatgaatttctcttattatattaggattagtgagatttaaaatatcattatttcctttttgattacaagagatgtttaaattccccctataatctttttcctctaatttataattttgaatacaagtccccatagccccatctagtactagtattcttttttctaatagctctttaatttgtaaattcatcaagtttcctccccaaattgttttatataaatagtctaataggtttttagtagtattcagaaatttatgtaattctcttttatccttaagtaagccctaaaatacacactaataaaaataaacctatattttcttatatcaattttaaatgatttaccataaagagtccaattattttaatattttgttaaaataaaataagtaatgttatcggtaatcctaaatgctttgtcttagaaaaatgaaggtgcctcttctataaggctaagaggcaccttcaaaaatatagttgcaatgcacaatgcatatttcacaatttactattacagctaaaattctagcaatatttttagaattatcataaagaattatttttccaatatatataatttactatttaatttttattgtgaatttttcatcaccataaacttcaatagattttgatttatctacagttttaacagaatagtctccatctttaatttctttatcacaagtaattgtatactcatcagtatctgcattataattagtagcttctttttgttcttcaaaattataatcatcactaaatgaaattatattttcaccagttttattatctactatttcaattggagctgcattaactccatatcttgatttataataaatctttgtttttccatcttcagtattcactttagtaatagtaatatattcttttccatcactagaatataactttgtttctccttttaagtttaatttttcagtaatattatttttagtttcatgcttattattatttttatatttccatggtataaatgttaggtaatcagtatcatcatagatctctttaaaaccattactgaaatacattatataatttccatctttatctttatgacctactgcttctcccgacttgtttttaatatatcttcctttattatcaaatacagcaaaagataatctatcagcattttcttcatcatccatacgtgttccttgtatcactgtatttagtggtgttgtaataattttgtttatatgatatccactaactatattgcttaaatctatatcacactccttttcattcactttcccattaaccttttcactacttacaggaatattaaagttccaagttcctttaataggattatctaatcctatttcatctatatctagatttaatacaaatttatctggtatttctacatatccacccaataaatgttcattttgaaactccttaggcactgaattatgctttgacacattgtactctatagaacccgcaaaggttttattatcattcataagctttcctgttccacctgcactaaaagtagtttctttgccatttattcttagttttgctcctggaaatcttggagtatcttgtatttcattttcactttcaatagtatagaatattgataattgaacttcatcgtaaaccactttatcaatagtcatctttaagccgctactttccttagttatgtttaaatcagaagcatattcatcataattttcataaattttgttggtaaacattttaaatatattccctatgataggaatattgcttgtatatgttggcatggccattccaagtaatagtgttacccctatacaacttaccaatatgcagcaagctttctttatagtaaatcttttcttatttattttgttaagtgtactatcaatcttttgattaatatcatttggtacacagttaatttcatcctttagcttttttcttattttatcatcaaataaatcatcatttaattctatcatatctccacctcaccaattatttctctaagttttgttcttgcccttgtgagtctagacctaactgttccatctgaaattttcagcaattttgcaatatctttagtactcatatcctcaaaataaaatagtactgttgttactcttaactcttcacttaatgaatttattgcttttgttagatcaatattttcatagttatcattgtatatttctgtatcgctattttcagataaataagtaactctcttaactcttcttaatatttgtgtacattcattaattaaaattttaatcaaccaagttctaaagtactcatcttgttttagagaatttatcttttgaaatgattttattattgtattttgaatggcatcttcaatatcttctttatcctttaaaatgcctcttgctactctgtaaatattcaatctattttcatctataagagctaaaaaagcttctttatcgcctttcttcgctttagatactgttgattttttcctataatcaaaaaatgatatcaactccatctttttcctccttaatttatactacctagctaagtattacaattattagatggggtagaaaacaaaaatgttcccatgaattttaaaaaaccaataaattttttccataatactctattactcttccgttcctgtgacttttccataaattctaataatatgatactacatttttctattgtaaatggtaagaaatatttacataaaaaatagccactctatagatgaacaacattaaatttagacttattatgtgaacatatttccatattcactatatataattggttatcttaattagaaatcataaatatatttgtgtagaaaacatttgaaaatgagctgctaagattcttagttgtagattgttccactttagcttgtcacgctgaaagcgggagcatgctaaagtggtgaaatctgcaacttagaatcttcagtgatattttcatagcttttcggaacaaaatatttatgatttggtaagtagactagggaatcacttccctaacccctctcagaaccgtacgtgcggatttcccgcatacggctccccacattataattcacagtatatatgatatatcttcttttaagttgaaaatattaacatatattttagctttaggtattttgaagcactcaaacatagtgtcaaaacttctccagttataacttcttttctgacttcttttgtttagccatttaaaagttagttttcttactaaatatctgaaagttgcgagacttaaactgttgtcagtgattccgtaatacctataatatcctattagtctctgtgtcagtttctccattaataatgtgagcggcactgttctattattctttaaccattcattcaatctctttatgctagctccaaatttctttgagctagtcttcctcttaactctaaaacttccattctttctgcaactgcagaagtgtgtaaatcctagaaaatcaaaagttctatctttatatgattctaactttcatgctctcttgaattttctatcatagtaggcattcttaccgaaatataatattttagttttatcttcagctacctgcaagttaaatttgtctaatctgtttttcaatgcttcatagaaagctttcgcttcgtcttcatactgaaaacagcaaacaaaatcatccgcatagcgtactatgtaagcctgtcctttacacttctttttgataaagttattaaaccatatatctaaaacataatgtaaataaatgtttgctaatgttggagatattattcccccttgtggagttccttcatatactttataaaactttccgttttccattattccagttttcaaaaatctacctatatatctaagtaagttcttgtctgcaatcctgtgttcaagaaatttcatcaaccacttgtggtcaacattatcaaagaatcctttgatatcagcatctacaacataattcacattcttttcagataaatatacatttaagattttaagagcatcatgacaacttctattttgtctaaacccaaaagaactatcaatgaaatcttgttcatatattgattttaatattttattaatggctaattgtacaactttgtcttcatatgccggtatacctagaggtcttttcttgtttgaaccagacttatctatgtatactctccttacaggctgcggtctatatttaaaagtcttcattctaattagtagattatcaatattattctctaagttagttccatattcttcctttgttaccttatccactcctgtagccttatttccgctcagttcataatggcataaaattagcatttccttgttaactaaatgcattagtgatgtaaatttctctttaggattatttccagctatttctgctatcctctcaagttttgtgtacattttttttcctcctctgtgtgagaatttctgtttctcttttcaaggtctataatatgttacacccttccctccatggtcattactcatttcttcagtactatggtgtaatccgactactcattatcatttgaatacctctgatttctaatcattgttttccatactctgaagtcagagaataatgagtcctcccaagttgacgtactatatcaatgtataccatgctacaccttaaaaccacgagaaagcacagatattcttgcaataatgattatctatgttctgacttctaatttaccgatattatcgtcctttctgactttgtgataatttcgtggctagtagtttcagcattcgcttgcggcctggtaccttgtttgtctacacttaacttattacatcgccataataagcccaagactaactaatgactggttgctggcctttgtcatgcaggattcccacctgctatatagtaataatgaggaaggttagccctcattatcttttacgcccttgcttggcgtaccggtaagttaccacataaatctaattttatatttggatatctatacgaacgactatttttttaaaatatttttaatgttattctgctttattatttggcttgcttcaaaacatagtaccaaggagttgctcctctttctatataatcaccatttttccattcaaagaacatatattttgaaccgtttatttcttttattatatattttgaagcagttttatcgctagcatttaaaactaagtcttttgtccaagttatatttttattctctattttaccattttcatcgaagattaaattatttaaatataaatctccattccatgattttttctctggattaaagttatttatatcctcgacaaaatcaacgctatcccattttccaattacttcaggatcattaataaaagggtagtcaactttatcagctcttgtttcaacttcattaccagatatattagtattgagtgatggagtagaactaatttttttcaatacgtagtagcaaggtttctctcctctaattgtataatccccgctcttccattgaaagaacatataagttgaaccatcaatatctttgattacataactactgtcagttttgtcagcatcattaagaatgtgatccttagtccatgtgaatacagttcttgctaccttcccatcctctgtaaagtttaactctttaacaaataaatcacctttaaatttcttatcatttacattgaaatcttctatgttttcaacaaaatctacactttgccactcacctattatattaggatcattaacaaaagcataatcaattttatctacatttactgcattactagctccatttatatttgcagatgcctttgcatcagtaagtgcaataccgctaattacaagcaaagatgcaactgccattgcagaaaatctataggcctttttattaaaaacttttatcataacaattctcctttttacttcagatttattatttactatggaagttgccccaactaaatgaactgactttgaaaaatgttctatcaaatttatgattgtgaatccatattccgcaacttcttcatcttccgtataagaaagtgcaagtgaatcacagcatatttccatatcctctttcatctttctaagaccataatgaataattggattaaaccagtaaatagtctttaaacaaattattatccagtttataactatatctttacgtttaaagtgagataattcatgaagaaatacatatcttaatttatcaacagatattatcttatgaatatcctttggaattagaatcattggattaaagcaacctagtagagctggtgtctttacgctagaagtctcgactagcagtatatctcttttaattttcattttattttggcagtattttaaaacatctaaaaattcgatgttactttgcatgcactcgctgcttattttatttctcagttttttatatgcaaatagaatatatgagagtataaacactgtgcccataagccatataaaactcaatatagttaaacttgataaactatacccattaatttcgttattgctaaaatcaatggaatttatagttcctaggataacatcatgattagacatagaactagcttggctgctccccttttctaacatacttccaaaatgtacttccttattaggaattaataacaatatattttttcctaatttatttataagattaaacatgcttaaagtgctctctggaagcttaaatatggttaaacgcagtattactaaaaaccataatgcatactgaaactttatccctattctttctctggaaaatttcctaaaaactaaaattaaacaaatcaatatgctgctagtgatagatgtttgaaatattattttaaatagctgatcaagataattaaaatactcgtacatacactacttattcctctcgtctaatatccttttaagatcatctatatcttctttgctcaaatcactttcttttataaaacttactagcatattcttaatagctccattataaactttacttaaaaatgtttgattctctgcacgtatgcactcattttcatttacaattggataatataaatattttctgccttcttctttaaatccaagtgcatttttgctaactagtctgcttattaatgtttttattgttttaggcttccaatcttttgtatcttctaacgcctcaataatttgatttgatgtacgtggtgaatctgtccagacaattttcataacttcccattctgcctcagatatcttaggtatttctcccataactttcactcctcttttttgtattacaattgtaatctataattagaatacaactgtaatccttaattgtcaatatatgtttttgaataaatttcagattaaatatcaatactatatacgtatctattttagaatatcttttaattttctgcccaattaaatagacctgatttcaatattactattaaaatcaggtcttattttttattctttaggaaattataatactattaaatctgtaaataacttttatattagtctattttacctgggttaattactatataaagaataaaaaaaaataaatcatattcgcctgccaagtttttctcacatgcgttcgaaaaggcagatgcgtgaaaaaaatctccggctccaaagtcgccttcgatttttttattgcttattataaaacaatccagcttcttttataatttcttgctctgtaaataaactttgtacagctttagtataatcgcttaacttttgtgcgcttcttatttttttagcgtattctttgttatctgaaaatatgtaaatcatatatccaaatagctctttcattctatttattgcatatatatcttctggaaacacctctatatatctatttaaaatttcatcatggaaatcttttaatatatttttgcttgtattaatatcattttttattatgttaatcaaccctggattagcaagtatgcctcttcctagcattacggtatttacctcaggaaaatccgctactaatttattataatcattaattgtgaagatatctccattgtagcatactgggctattacttagtgataaggcatctctaaacacatttaaattaggcttgtttccataaaagtctttttgtgttctaggatgaataattaactcttccaaaggatatttattgtaaatttttattaactcataaaattcttctggattatctcttcctattctagtttttatagaaatcttaatatcatccttcttgaatatttcctctagaaatgaatctagtttttccctttttgccaaaaatcctgatcccctattctttgaaacaacagtccttgcagggcatcctaaatttaagttaacttcgctataacctaattgttgtaactttctagaagtattaatgaatccttctgcatcgttagtaagtatttgaggtactatgttcatgcctttattattttcaggtaggacatctacaagctccttagtcttaagacttctactttcatttgggacaataaaaggtgtaaagtatttatccacgtttccaaaaaacttttcataagaatttctatatatgtattcagtaattccctccatgggtgctaaatagtatctcatttaataactcctttatgtatactaaaaaacaaaaccttttaatacatcatttattgtttgtaaaacttttaataataactttaagatgtatggtaagaaaaatgatgctaataatactgcaccagccaaaattaatatattataatttatcgattgccccattttaacctgatataagtgtatggctcccacagatatagatccaacgattaatactttagttgctatccacgaaattatgtttataacctgtaatactgctattattactgataatacaactataaatgggaacgctaatatcttaaatggcagcataatcaagttaaatgcctttttagtatcattttgcgatttcttttcggctgctctttgttttcttcctttttcctctttatcatcgtttaagctattttttctatctttatttcttgaagtttcttttctctttagattattacttttccctccagaactctttgccttacttttagaattacgcctacttttagaagcttcatcttcattactataatctttttctttttgtatttcttttgggtttatagctactgttaaattgtctttaactgattgattttcctctaagctgattaaagctttataagcctcatcaaatatcttcaaaaattgattaagtcttttttcattaaccacttctttttttattttctctacttgcatttcataggctttttttatctcttctttcgatgcattcttttctacgcctaataacttatggtaatctgtcattacttctctccatttctttaaattaggataatcctattttaattttaaccttagtactccttaaagtattatacttaaaattataatcaatttaaagcactgactttatacaattgtattacaattatctatttcaattaggatttattaatactttttgtaattatagccaaactacttaatatatgatgattaacttatttaatattagctaatcataactgcttacttggaggttttttattatggagcaaaataaagtagatagacgcatacgaaaaactaagaaagttttaatagaagccttaacaaaacttatgtctgaaaagaaaataaataagattactgttaaagaacttactgccctagctgatgttaacagatcaactttctatctttattacaatgatatatatgatatgttagaaaaaattgagacaggattattcaatgattttattgaggcttatgataagttttcagaagaaacagcctcctatgataatttattatcatttttaacttatttacttgaattcataaaaatcaatgcagatatgtttaaaatattacttggccatgatggagattatgcttctatagaaaaatttaagaattttataaaatatgctaatttaccagtaaacagttcattttctaatacaaaagctcattattacattccttatacaatctcaggctttattggagttgttcaacagtggcttaatgatgatatgaatgttccacctaaagatttagctgctactataatagaaatgttctaacttaatattatctttataatctctctattccaataagcgaagtatagctatatctatatcgatacttgttgtaatgcaaaaaataaaggtgcctcaattttttcagcacctttattttcattaactctatatttcttctatataattattatttttcattgcttgtgaaagttctttcattttagtattcgatttttttgaaatatcttctgatagtgacataagtgctggtattgctattggaagtaaaacaaaagctaataggaataatcctatgacaacagctattgcaagttccattaatataacaatattcgaaggatataaagtagcgaaagttccagctaaaataatagctgctgacattactactccacctatttttcttgatgctaaaactatagcttcttttgctgaaatatttggatattccttaaagcgcatcatcaagaatatactataatcaacaccaagtgcagctatcattataaacgagaagaaaggaacattccaagacaacccttctgctgcactgctaaataacatttttgatataaatgccgttgatgataaagctgcataataagccactccaagtgaacctactatataaactggaatccaaaatgattttattacgataactagtaatataaatatagctcctaatactattatctgagtaaaagttatatcatgtgttgcaacattacttaaatcattagaattagctgttgcccctgcaactccatattttacattagaaagctttgtaccactaagattattttgaactacagtacttatattatctataagattaattgaagaatcagaatatggctctgaatctaaagttatagttaacttagctatttttctatctttagacatatatgcatcaaacattttgcctatatctgaattactaaaagcttcatctggtatataaaaactttttgtattagtaagctgatttaaaaaatcattactcttatcaattccatttgatatactagacaatccattactgcttccgtttaatccatcctttagttttgtcattcctccactaagattatttaatccattgtataaggaatcttgtcctgttttaattttatcagcaccatttcttagttgtgacatacttgaaataacttgttcttgtccagcactaccttgctttaatccattagaaagtgctttagcaccattctcaagttcattaataccttttgcaaactctgaatctgaacttgtactagcaataactgtttttaaaccatcattgacctgattcaagcctgaagtaagtttatcgtagttattattagcattgctcatagcagaagtaatactatctaatgaagaacctaatttgttaatcatctctttaagtgccgctacatctggatcatttggtaatttcgcatcaacttttgagatgcttccctgcatcatcgatgacatctgctttaattgacttatagatgtctctaaggatttatatccttctccaagtgtgctatatccattatttatttctgtgattttgcttgaaatattatcaagtccaccatttattttagctaatccagatttaagctgtcctatacctgacgctagattatctgcaccatttgctccttgtgcaattccatcattgatttttactaatccattagttattgcatccattccaccttcaagattaccagtaccttcagatagatttttaactgatgaaaaatctggagctgatagactattatccatcttgtttaatccatccttaacctttccaatcccatcatttgcactagataatccattcactacagtatctgtttgcttatttgtataaaaattatctattatagttcccataggctgagttggtcctgatacttcttttattccctttactcctttaagcttttcagtaagattatctataactgctaaatcttcattattgtctaaagcctcatcgctttctaaaacaacagtagtctgcataacctttcctgcactaaacttgtctgtaataatattaaagccttttacagattcatttgagtcacttaaatccttaatattatcaaaagataatttatttgcattaactgctattacaggagtgagtattgctgcaacaactaacaaagaaactactggatgctttactgacattgaagttattctttcccacaaaccactttctttatgaccacttgcttgtttagaaggccaaaatagcttacctcctaataatttcatagctataggagtaaaagtaaacatttctattaaaagaacagctatgcctatagcaacagaattagctgatctatatatagaaaattgtacaaaagttaaacttgcaaaagccattaaaactgttaagccgctatataagattgtcttacctgaagttttataactgtttataatagcttcatctatagttaatccattagataactcttctttaaatctattaagtaagagtatgtgataatctgttccaattccaaaaagtactaaacatatgaacatttgagtgaaacttgtaataggaaaattaaatttattaactagcacacctataatacccattgatgatacataggataatcctactgctagaagcgttactaaaggtgtaacaactgaacggaacataagcactagcacaactaatataaatcctacagttattaaagcacttttatcaacactcttcccgacttcattttgataatcattatttatggcaagtgaacctgtgatataatgatttaccttaacatctttgatttcattattaaagtcttttattacagcattaccatctctttcacctttctcaaaagaaactgatacgagtacagttgtattatcttttgatatcatctgatcttttgcttcaggcttactgaatggatctataatgttatttatctgcaatttttctttattttgatttaacttatctataccctgttcaatatcattcaaatcaccatctgagagttccttatcgctgttaaatactaatagcaatgagtctcccttagaatcacccattttatttatcatttcttgagcaactacagatggtgagttttcacttatagtagctccacccttctgacttagtaccgcattaaaatttggttgattaattacgaatactattgtggctataatccatataagcaatatactaaaacgatgctttaatatttttctcataaattcatcctccgttaatagtcattgttttgtcgacatgtgtttattatattttgatggattcctcatttcaatcatcaatattataaaagcttgttggatataagacacattgataaaaactgtcgaataacttatgaaggactgtgtataataatttaagtaatttatgaaaagaatagaatcaataatattaaatatcctgtttaggaaaatttatatgataaatttctacttaaaaacctaatatgattttttcaaaaatatgaatgcattttctcctttattttctcttaatcttcattactcacaatttatttaatcattaaaacactccctaagactttactttaatgcagctttttacgagataaaaaaatgaacaacgccactaaataacatcattcattttctaatattatagcctttttaaactacatattatatagtaataggactttaattatttattgatttcaattgtagggaactttaattccttatattttgcaaacttttctttaacaactgccaaattctcatctgtatagaaaccaccctgtgtatgcataatttcctttacatgatgtcctctgccttcaacagatgtacgatcacgaatcaatccatcttcttggataacaaatttccattttccttcttctgtcttctctaaatttccaccagcaccacaaacttgacattcaactggataatgtagcccgtcccattgcacttctccaagaattaatgcatttgaatggcaatgtgggcaccatcccataccttcttctccaagccaagttctttcttctactggagtatttaatgatttcattatattttcacctattttatgagcacgttctatcatatcatcgtgcaataagcactgttttggtgctggaactcttgttgctaaatacatatcaactaccttaaaatcatttgtaaaacatgtagcctgcatactttcaagtgccattgactgccaagaacgagtagatcccccaactgcaattaaacctgcaactctgtccttatgctcaattgcaccaataaattctaaaaatgctgattcatatgctagatttctatgcataaattttgaaaatgttgctgttggcattaagtcatatgttggtgctgttgcaattatagcatctacatttagcatcactttcataatttcttccttatcatcttttttacttaacgtacatccaacattctttccattactcattccatgggtacaagctgtacaccctgaacattccataatattataatctcttaaattaatcattttaacatctgcaccttgttcctgacatgcaagtaatgcttcctttaataagatttctgaatttgaatcttttcttcctgctgtaatacctaatactgtaaaactcattaatacttctccttttaatagcttaatattttgttaaaattagtttatacttttgcattttctaattataatttaatatagatacctaattaagtcctgaacttatgcatatgactcgccgaaatgaataacatacttttgttccagtttctaggaaagttggagcatgctaaagtggatacaacctgctgcttagaagcttcagcgatattttcatagcttttcggaacaaaatatttatgatttcgttaagttaccacataaatttagttttagagccagatatctataagataattagttttgaattgcaaaaacaaacgatttatcataattttagcattatggaaaatgtcattcatcaaaaataagtcttaaaataatgctcttaagtttataatgtttagacattttttcaatttaagcgaaataaggagaatttaatgaaaaaggaatacgatttatataagaaaagatatgaactttatgatagtttatttgttcaaaataatattaatgatattcttaacatatctgagaactttttaggaaatcctatttttattttagatacaagctatcgactcataactcgttctaatctagctaagtgtgaaaattcaagcatcgaaacccataatggtgaagattatttattatcaggtattattagtttgatgaaagaaaataaatgcatggatactatttataaaacaaataattcattttttcattattccgatgaaaatttaatattttgctctattaaagttaatggaatttcaataggatatataagtgttcttcaacgtaatcgtgattttgaagatgaagatttagagcttacaaatatattatccaatttactttctattcaaatacaaaaggaaaatctatttataagtaattcaggtttagatgaggaatattatttgatggatttattggttaatgatatagataatatggaatatgccagtgaacgattaaaatatagtagctttactttaagcaaatacaatttaatcctttcaatacccttcaaacagaaatatgaggattatagacataactttggattaagagaattaattcagaggcttaaaagtatacttggaaattgtatctcaacttattataaggatacaattatttttcttattagcaatgataatgaacaaattataagtgagtatataaaagaaaatctattagaatttttaaaactaaataatttaagatgtggagctagtattaattttaataatttattggatataaaagattacttcaagcaatcaatatgcgctttaaagctatcatcatacatgaaaatcaatagtaatataagctattttgaagattacattgaatattatcttattcatatatcttcaagttcaaaagaaaataatgatctgcctagaattgatataacaaccttagttaaccctctaataaggaagcttattaaatacgatgagaagaataaaactgaattattcttaactctgaaaacctacttagaatgtaatagaaatgctaaccatacatcaaataaattaaatatacatagaagcacattattttatcgctttaataagattcaaagcttacttgatatttccttggaagacagtaataacttatttaaattagagttatcaattaagattttaaattataataaattttcttaagctttacctaaatattatgtaacaacttttaatactgcctaatatattgttagtataacaaatgattttgattaacaaaggagaaatgggctatgaaaaagtgttgcaaaaaatcttgcaagccttgctataataacaattacggatatggtaattatggtatgaattatggaaattacggtatgaactatggtaattgcggaggaaactgtggtttaaactttggaaattgtggcatgaactacggcaactatggaatgaattacggtaattacggtggatattacggaaacggctttaatgcttggaatttatggccatttttatttctttaaaatatattaataattattttatcctcaatattattaatacgctcataagtatattcaatctaaattctgtattaatttaaatgaaggcaagtatattatagtaaaaaaatcccctagcggggactatgagttttgtgaattttaaaatggaaagggctcatcttcatcaacccaatatgaaccttcttccgttttcttttctcctgaataataaaaatccgcattacaattagggcactccattactggcattcccttccttttacattcttgttctgaactgtattctccatcacaatattcatccatatcagcaaactcatctacgatgtccgcgggagcgaattcactgtaattacatttataacaatgatatttgtaaaacttttctatgtactttatctcttttgggttcatataatatatcctttctgttactcgtctcccttatatcatatatcaccccatattccttatgccatattttccataaaaatttttcagttccacatttactacataataatggatttctttcaaaactctctattattctttgtttccatgatttcttaatttcattttgtttattcttttcttttaataattcatcaatatttctttgtttcacaaaattataaagatgaacaatatgttttgctagtttattgtttattcttgaataaacaccatatcttcgcaccatcctaaatcctttaggtgttatatgttgtgttatttttcctatgaattgcaaagcatcgcactcaataacttttttaagaccatcattatgatcttcataccaaaatttcactctattactttcatatttaattatcctatactctgctatcgcagctcgggcaaggtatctgcctatatattttatagcttgtcttgtatcatctaattttcttttagcattcacatagaaacctttcgggtattttttgtatagataacttattaattgtcttgtcttataagaattgaaatgcttttttattatttctaatagaactttctgccatgattttttcaaatatggatatggaatatactcaacttgcttccaccactttgtttttttatcaactgcaccttcagttactaaagcgtgcacatgcggattccattttaaatctccgccaaaagtatgaattactgcaatcactccaacttcatagttcgagcctttctttttattgtaccaatacttaattacctcatttacaccatcttgtaattcctttaataattctctcttggaataaaaataatttcttagttccttcggtagtgtaaatacactgtgtcgatgtacaactcttagcatgttttgtctttgtttttcagcccatttcattgtatacaatctaccgcatctattacaaaatttacttttacatgtaaacggaacttttgtactttctccacatgtttcacatttatattctgcaaaaccatatttaatatcactacactttaaagccttacttacggcttcatcaatatgctttcgcatatctttcggtaccttattccaatatttatttttaaaatcattatagttatcatttaatatatctcttactgttattttctctttcatcataatatctatattttattagttatccacagattgtccaataatataatttcctatagaagaacaaagtggctgcgccacgctcattcggagaaatttttaataattaaagcaaaaaccatagagattgcattttctctatggttctcttatcacaacttatattttttccaatataccccatcgtattcttttggtctcatagtaccgccacatttttcgcatgaaaaacaaggcggttcatctatgttactttgatccatctcatcaaagtattctacaacctccctaggtatattttctgttattccacattttaaacatttacatgatacaatgtctttcacttagtatccctccaactatgttgttgtcggctttattttaccatatagaactccttttgcaattgcatatatttccagaatgttttctaacttttctttaccttcatttataaatttctttttaaaatattctcgcatcgagccgtatcgtggatacactatatcgttaaatttcattttacttccacatttaggacatttacacggatctacaccaaaagaggcaagaatcctatattcccacctttctatggattttttaatttgtactatttttttatctatcatcttaataaattgatctttatccttacttctccttgaatatagcccaaagtatctcaccattttaaagtttttgtctggtatatgtattatgactttttttataaactcaaacacgggcactttttctattacttctttgttatcctcgtgtcttttatatttaaaggttactcttttaccatcatacgcaagtattcttgattctgctatcgcaggacggccaacatatctccctatatattttgctgctatctttgccgattttatttcatttttagcatgaacataaaatccttctttattatttttatatatcttgttctttaatcgtctaaaactatctttatttccttctctttttattattgcatctagtaatattttttgccatctctttcgtaatgcttcatatgaaaaatatttaaaatttctccatatcgttacttttccctttccaccttctgtaaccatcatatgtacatgaggattccactttaaatcccggccaaaagtatgtatcactgatataattccagggataaattcttcttttttattttgatcactcatccaactcgtaacagctttagctgcacattgcggaagtaacctcaatctatctctttctcttccaaaataatttctaagctcctccggaattgtaaacaccatgtgcctatgctttacatttattaattttcctagcattccgttaacccaattatcaacataaatcttaccgcatgatgtacagaatctacttttacatgtaaaaccaactttctttatttcaccacaatcatgacattttaattcaatatagccattatttatatctttgcatttcataactttttttatttctgcaatgacattaggtcttattctatttctatattttttataaaattcgttccaattttcttctaatattcttcttaatttactcttaatcatttcatcaatttaccacatatagcttctcaatacaagtctacaagtcgctttcagcgttcggaatttttatactttcctagacattaaaaaatagacctaaaagatttattaattaaatcttttaggtcttgttgtttaagatataaaatttcgctttatatcttaaacaactatttttattctcttagtcttatgcttattacttaagaccttgttcgtaactttcgatcatatgttttaccatatatccgccaacatatccattttgtcttgaagaaaggtttcctttatccatgttttcataatcgtttaatccgacttctgaagcaacctcagtttttaatctgtttaatccttgttttgcttctggtactaatgttctatttcttccactattattatttgatgacatatgcatctacctcccttaattaatataaattttgcttggcagtaatatattaaccagtatgataaattataacccataaaaatactagtaaaagtagcatcgatagcttgtattacatacttttccttgtttaagaattatatttcatttaagtccataatctcctattagttcaccctctaaatattaattttttaatagatgtttataatcatattttttatcctaatatagaaatatttccatacctattagatccttcagggatattttcatagcttttgggaacacaatatttatgatttcggtaagttattacttaaatttagatatccatatggataaacaaattataagttagatttatgctatcaaatatatcccaactagaaataagaattatggttttgcgaaatgtttcattaggaatttgatggctttgattcttagattaaaagttgttccaagcatgctagttcaaagcttgactttgaggctagcatcttggatgcaacttgtgatcttagaatcatccatcataatttccttagaaactggagcaacagcataattcttatttcggcgagttgtatacctaagttcaagttatatgctgtttatctatatagatctcaaatttcaagataactgtatattttttatatataatgcagaaaattaatatataaaattggttatttatattctaactactaaatattcggaggatcatatggaaaaagaaatgctttctcagtattatatatttttaatcttaataccaatactatgtggtactgccgctagatacattacattagtcgttgattacaggcaatatcccagctatccaaatggatatttaattcatttagtaactgggtttatatcttctggaataggcgctattgcaattccagctattctcgaaaggaactttgaagcaataacctttctagttcttgctactgaacagtttagagaagtgcgaagaatagaaaaagaaagccttcaagatcttgataatgtggaacatgtttttagaggagaagcttacattgacggtattgcaaaaacttttgaagcgagaaattatttatcattgttagtttcctttttaactagcttaaccatgcatattgtgcctcataatattattctaataaatatattaagcggtattttagctggaggtataattttttatatactcaaaaatttttcaaaaggcaaatccattggagatattgctcaagtaaagctagctaagataactgtaaaaaattccgaactatatgtagatgatatttttgttacaaatcatttaggtacagatagagcaagaaatttagttaaagatggcggcatggcagctataatttatccaaatgaaagacactttaacagaataattgatcatcacggtcaaaggcaggctataatatttgaagcttgcagaatgttaggactaaaaagatatcactatactaaatgtgactacgaaacaggaagagtagcagttatgctagttccaataatttataatgaaggctcttttatagaaacaataaagaaaacacctcttttagagagtataaaaaagagctctagtttaatgaaatctaatcttaataaatagaaaggcaggaataccatgggtacagatttttataatactggttatgaaataatagcatatataaccctatctaaagatagggcacaaaatggaaaccccttaattttagttgcccaaactccagaggagcaaaagcagttaactgatgatatttcaaaggctttaagagcagaagtagttcaacttacttgcggagattatatgattattagtaaaaactaattaaataaacttagtggcaggctcaaagtaatttatattaaaactgatatttgaatacctaatgctgacagcagtgattatactttaacatttagaaatatataattcacggacacacaattctattagagacattttggatctattgggaattttatattcaatcccgctaaataaaaattcaccgggataggtgttgcataattattatttggaaaatataatcctggatctccttctaacctatttaatgccaataatatagtataattaagttctgttatatttacttgatatttcacaaatgtagcaatagcattaccattagatataatgaatgttaatttataattaaattctgctgaattctgtgattgagactcgttagctccttcactttcatctgacttattacccatttcatccttttgagattccttagttttttcattcatttctgaatcagattgattttcttccttatcttcttcacatatattttgaaggcattgatgtattagtaaatcaatcttttcatctgggtggattggttttgttttgtcgtactcaataacacccatttgaacctgattaataaatagaccaattataaatgttgtaatgctaatctcaacattagtttcaagagcttcacctaaactgcctgtaggaccattatttgaagcacttgtagtaataaatacatatattttattaacacttctataaatcaattcaccgtctaataccaatacattgtcattttctaaatattctgcacatggtggaatgactgcatctgcaaatggattaggattgcattgtgatttcttttgtttgttcgtctttttactacctctacattttctatcttttttacatttacacttcttcatatgtatccctaattacaattaatataataatatagtatgaatcactattaaattatgctcactaaaagcattataaaattaattcataaaaactttatagttcgaagcaatgtagcatattcatataccaaagtaaaagatttaaaaaatagagaaacaatgtatgtgtgagattttgtaagttatgttataataagtattatgcagacctataatctaatgaacaatggttagaaaaggcgaactaactaaaatagaaatgatatagagcaaaaaactaaaaggtggggtaaaatgaatgcatttttgacagtaataccactaatacttattaggtatggggttttaagtataatagacaaagaatcacttaaacgtgcggggttctttgctccattaatcggaagagaaaaagtagcattctgggtttatcaaattacaaccgtacttattttactatacccactattactcaaaatcaaaactgactctgattggttttacataggtttaggagtatacagtttaggaattattttatatgctgtatctatagtaaattatgctaagcctaaaatgaatggaataaatttaaacggattataccgagtatcccgcaatcctatgtacattgcatattttatttattttttggggtgtgcattgctaacacattccttgatattacttgcgttattaatctgttttcaagtatccgcacactggattattctttcagaagaaagatggtgtattaagaaattcggagaagaatatataaaatatatgaataaagtgagacgttatatttagacaattatgatataactctattattcaagttatggtttgtgttcttcttatattattcaccaaagaaaatatttgtaatgtaataagtatccaatattgagcattataggtgggcaatccgcctataatttttaaggctatatttcaacattatattaaaacatagcctatttattaataatgaaatcctgttttttatccattttactatcatacaatctaaaaatcctgtactatgtaaactcccctatctatttttcatagattcttctattgcgcgatttttatcaagtgttataactccattatccaatataaaacatggtatccctattctcttttcatctttaacatcatcaaataatgaattttcatcacgaattgcaacaaattcttttaacgcttttatatcttggcaaaaatctctataatcaaagctaatatttttctcttttagttcctctatagcctttaatgtggatggacacacattacttccataaatcttcataataaaacatcctttcatttatatcttttgctttcttaaaatatttttactgtggttcatgattcttcatatagataaacaactataatctatacttatgcgtaacctcaccgaaatgaataacatacttttgttccagttaaaggatatctcatagtctaagtatacttaatgattatgttatccataggattcctcaatgagagtagaacttatatagatttcagacaaaatctaatatttattaaggtaatagctaaagaatctaatcccaatacttcaatagttatttttttcaaaataattatatttatactttttgataccacaaatcaaatttgaagtatcaaaaggcttgtggataatgtcgacttgttattttaccagtttaaaacaccagctgaatactataactctaattattagatggacattatttacaaagctgctaagactttaagttcctatcttcaccagaaatcataaatatatttgtgtagaaaacatttgaaaatgagctgttaaaggttcttagctgtaggttgttccattttagcttgtgaagtgagagtccaaaattttattttgggttctcgaacttcctcagcgaatgtaatgagtcgagcttccctaggaaagttggagcatgctaaattggatacaacctgctgcttagaaccttcagcgatattttcatagtttttcggaatcaaaatatttatgatttcggtaagttaccacataaatttagttttagttaggttagctatatgataaggatctaaatttagctttctgttaaaaatctaattttttaatttttgctgaagctttggcatgcttttatacatgctcattaggctcactacaaccaatagtatccatcctattaatgatgaaaatgctagtaatataactaatattataataagcaatattattgatatttttaaaattataccatctatacatttgagactagcaataagtccaagaagtgcattacatataaagaatgtatttgcaattcctactgtccattctacagtaatataattgtagtgaatgaggacaataagtatgcaatgaaatatagttaatactaataaagctcttttaggagatctttcttcctctttctttcttaaaaaaccaggaagcataccattttctgctcttgcagccatttgtcttgtaacagcacctaatatcatgatcaatgtggcataacacaatcctgctgccacaatacccataacaatgtaagataagttaccgaataaaggaataagaattaaacttacattaatgtctgtttcttttgtaataatttgatttcctacactattttgcagagcaaaagtagtcaataaatatataaaaataacagctgataaacttattttcatagcacgcataagcgttttctctggattcatgacctcttcaacgtaacttccaattacttcccaccctataattgcccaaaataatagcaaaagcgtagagccaagagttgtaattggtggcataccacttggaaaagttacattatcctgctttaaaagattaaaaacactgcctataatgagaataagtccagtaagcgaagaaagtattaaagtaacctttcccattgcagttattcccattagaagcacgactatattaagaaataataatataaaaattacaagggtcctataattatttgctcccggaaacatattacagataaatccagaagccgtatataaaacagctactggtccaaagcagacagctgctgtcaaataattcgaagataattccctaaaattatgtccaagcttctcacctattaccacattcactccttcattactcaaagttaatatactcatttttgtaaatatgtaagcaaatataatgcccataagcatagttattatccatgcaataatcgctttatctccaagcatatgaattgcaataggtggtaaaagtacaatacctgaacctaaaattggacctatcattagtccacttatagaaatagtgtttagttttttattcatttttcccctccttggtgttgattctcttattataagaggggttaacccatttgtaaaattgaaattttaaatgcagcatatcaataattttgatgattaaaaattttctatttaataaaacaatccaagtgatcttagttatgctaagattcacttggattgttaaacctatttatattttaaaatttaaaaccaattcagctaatttttctgctgtttctgcttgatcttgagccactctagcaacctgttctattgctttattagtttcatctatccctgctttaatttcctccgaactgtttttagtatctttcatattttcagcaatagtttgtacaacttcagaaatctcttctgtagatgcatttaattcctgtgacattgatgcaatattttgtgataaatcactaatatatgcagcatcattttcatatttatttcctgtctcaatcaataaatcataatcttttttaacattctcattgacaaaatgtagtacttcctttgagttgcctgataaattattaaaggcagcctgaacatttgaaactacattttgaatattcttaacataatctgctgactgttcagcaagtatccttacttcatttgcaactaccgcaaatccttttccttgttctccagcccttgcagcttcaatatttgcattcaaggctaacaaatttgtctgttctgctattgatgcaattgattttgcaattatccctatttcactaactacttttccttgctctattgcattaagtatattattttgcttttcttcatacaattcatctgtagctttcatagaattaattccagtttcctttacttcagtagctctttctttaatttcgatagactgatggctgctttcagttgaattcgaagccagctgagttattccagaattaacttcctccattgttgaagctaactcctctgtaattgaatttataccttgtatgttttctactattccagatgtattcttatctatgctttcaaaattgcttgataattcttctaatgtagcagataattcttcactagatgctgttacgccctgagcctgaatcacaatattttcaatcactgatttgattttttcttttgcattatttaatgctctaattaacaatcctaattcatcattatttttactttctattgaatatgttaaatctccgtttcctaaagcttctgcaaataataaaacttttttaattatcatagatatatatattgataatcctgtccctataacaatcgccaaaataatccctactattagaattgcatgcattatattagttgttatgcggtaattttcttttgcactgctataagcgtcatctgcttgtctttggtttatttcaaccaagttatcaagatgttttgatataatttctgtagtttggttaatttcagataatttaatttttgcttctgaataattcccatttttaagtaactcaaaaagattgtctttttcagttccatacttgtctcttaaaatagaattaagatcatcaaactctttcttctcatcagttgacatactgctattaccaaaagcttcaactacagctgaatttttagttttgatttgatcaagttgttgtagcgctgtttgtaccttggaattatcctgttctagaactacatcattaacaattttaatttcaattaaaaaattttctttaaccgaatgtatttcatcaatactttttaaatcatcagaatatatttgttctgtgcttctctcagtatttgatagaccaaactttccgaagaaaccagttattccaattagtatgaccataatcataaaaccaattaacaattttatttttatggatagattctttatcatcagtataccatctcccttttataataaaaaattaaagtttataataatttgcagattattctaaacatttactagtttatattttatcaaaaattgttaaaatataatagcatttcgacataaatttttctatttatgccatttttatatttttttatttatataaattttattattatactactaatttagattataaatatttagtttttaaccatatatacctatacatttcctttttatacaaagtgtgcatcatagagtgttgttatgcaatgttttatttttttccaattaaattaaataggctagttattcatttgcataactaaccttaaaatttactcatttatagaatttatattaatcctctctccaaattttgttagcgtgtttttttattttgaaggagtgaaagcttccataacagcagcttctttatcttctgttattgctcctccacatcttttttaaatgcatatctcttgttggttcaattataggaaattattgttacagttctgtgacagatatttatcaataatgttacagattatatatataaatctaaaaattataatctcttcattttaattcatattaatcctaatatagtattatcttaccatattagtttaaaatagcataattctctgcaaaaattatactactagcactttatacaaattcatcaataagaaacctagctaattcaagccttatgttatataaatattatattcatgccttcaaaaaaacattttctacagtaaagccaaatttctctaaaacttaaatttactttattctcctttaaaatgcatctatttactgcacctttttatattgttaccttttttattggttcatttttaaattgttttatgttttaatttatggctatgtttaggaataatattatattatttttaagggaactttttataggttcccttaatttacattttaagaattttcttcattaatacatttactcaatataatatttatgtgccattaaatcttcttcgctgatatacttaacatctttataactccttgatagagcatacttatacatatccgatactaattggctatctttacaccaaaacataacatatgagcagtcatatactgcaagtataatctgacaatcactatctaaaaactcttcatatttcgatacttccttaataattccgtcttttaaaaaagccctcaaagtcagaaataccatataataagtattattttttgaactttcaaatagtcgctccccagatagtattctatcatcatcatcaaataagaacgcatttgtaaattcattatcgtgtagtaggtgtatttcatcattatcaactaaccattgataataattagttggcaagggttgtaatatatcagatagataatttccgtattcatttggaatttcaaatcttactcccatatttttcatttagttatcctccaaacttattggtaaatattcattttatataggttatacataagttgcttctcttacactaaaatctcttaattttgtatcagtatgagaagtatgagattgcactaataaatttttgctcttaatggtgtctttttctgtattaaagacttctaatcacttaaaccaatacatatagttagcaagatatttggttgcaacaccgttaaacctatccatcaatttctttagtttgctatggaaagcgttaatgtactgtatatactatattccttcgttattgtttatcactcttgatttgttgaagttctatacctaagttttgtgcaaattaaatgtaactcttgtgtaagtaattacaaagtatggcttcttcatcaattctatctctaaagagtgtttctaaatcagtatgtttcattcttcctttgcatataagttccgtaatgaggtttcctgttctatccacagcacaaattacactcacttgttcctttgatattcctcttttttcttttttcatctttattgctataaatacccttaacgcctttgaatgggcttttcgtggcattgtaaaagtggtacttttcttatggtcacccttaaaagactctctaaaaaaagcctcgtcaacttctatgacaccacctacacttcaaattcccatatatgctcttaaagcgtctaaaatcttatacacccaatagaatgatgtaggtatgcttattccaacttctttggcacattcttttaattaaactattctctttactaaaccttctttcatttgcagagtaatagaaataatagaaccatgagttattttttgtctcatggttctatttaactactagatatattttatcttttctttagcttatagcctaaaaattatttgctctcattaacaatagcaatactgttacttgatcctattctgcttgctccaacatttatcatatccatagcagctttgaagtctctaactccacctgatgcctttacacctaaatctggtccaacagtctttctcattaaagcaatatcttccttagttgctccgccagtagaaaatcctgttgatgtcttaacaaaatcagctttagcttctttagctatttcgcaagctttaactttttcttcatcagttaataaacatgtttcaataataactttaactaatgcttttcctttagctgcatttacaactgcttctatatcctcttttagtaaactataatttttatcttttaatactccaacatttataaccatatctatttcgctcgcaccattttcaatagcttgagatgtttcaaatgctttcgcttcttttgtcatagctccaagtggaaatcctactacaacacaagtttttacttcacttcctgcaagttcagtacttactaattttgcataacatccatttacacaaactgaagcaaaattgtattctttagcttctctgcaaagcctttttacatcttcttctgccgcctctggttttaatatcgtatgatccatatatttagcaatattcatatttcattactccttaaatttattttataactatatattttacaattcacaatttacaatgcataattcataatgcacaatacacatttcgtaattcacaattacgaataaaattcttgtaatattattagaattataacatgcagttcatggtttagattgattaaataacaagttgatactagtgacaaattacaggtgacaagtgattcacttatcacttactcaacgaacgtatttgagtcgggtttccgctaacggttgtttcaattaacgcttgtgaagtgagagtccaaaatttcattttggattctcgaacttcctcagcaaatgcaataagtcgagtttccctaggaaatctgtagcaaacattagtggtgcaacctgcaatttagtactttcagcgaaattttcgcagtcctgtgaaataacaatgtttctcctttctattaacgagtacctttttcgtatggaactccatcagcttttggtgcaactgattttccaacaaaaagaattaatactacaattgttagaatgtatggtagcattgcaagtatttgtgaaggaatagcaaagtttccgcctcctaatacaactgttaatgcttgagcaaatccaaataataagcaagctccgtatgcgccatgtggagtccatttaccaaaaataactgctgctaatgcaataaagccttgaccgctaattgctgttggagtaaattgtgctattattgcaagtgtcatagatgctccgccaaatcctgcaagtattccagaaatcataacacacacgtaacgagttgcagttacacttattccaagagtatctgcagctgctggatgctctcctactgcacgaatacgtaatccccatttagttttatataaaataaaccaaatgattactgtaattaaaagcgctataaaaactgtaatatctacgccaaatactttaggtaatttactagctactggtttagtcatagtagctccttcaaataataacctacatgtgaataaagaaaaacctgcacccaataaatttatagcaatacctgatattgtctgatccgcattgaatgttatagatgcaactgcatgtaataaagccattattccccctgcaattcctgcagctaaaaatccaagccatgcatttccagaataataccctactgccgcaccagtaaatgcacctatagtcatcataccttcaattccgatatttacaactccagaacgctcagaaaccactccacctaatgctccaaatattaacggtgctgaatacattagtgtaatacctattaatagtgcaatactatttaacattcttctcacctctctttaaaagtctgtcagctaaagcaggtacaatcttagttagtgctacgaaaaatacaatagtacctatcattatatttattatttctgatggtgcacctatagcagattgtacagattgacctccatatagtaatccaccatataataatcctccaaagatacagccaataggtgaacttcctgcaattaatgcaactgataatccgttaaatccgttattttcaaaagcagccatagttgataacttatgaggtgctgtgcctgtgatagctagtgctccagcaagacctgataatgcacctgcaattaccattgattgaactatattacgattaacatttattccagcaaattctgctgcatctttatttaatccaactgcacgtaattcataaccctttgctgatttatataataaaactgatataactacagccattataatagcaacgatgattccaatattaacatctgtttttagcaaaacttctgataaccatttgtgatgagaaagaaattccattccagcatcagaagtcttccaattgccaagtatagtagtaaatccagattcattaatcatataagtacttgttgaatctggttggtgaaatacatctgttgatacaacgaaattagataaatataatgcaatccaattcagcattatactggttataacttcatgtattccgaatttcgccttaagtattcctacaataccaccaaacactgctccagcagctacaccagctaaaattactaaaggaatttgtaatactgctggcaaatttaatttgattccaactatagttgatgcaattgttcctactatatattgaccttctgctccaatattaaataaacctgttttgaaagcaaatgctacacttaaaccagttaaaataataggagtggccttaataattgtattagatatatatttaggttttgaaaaaatacctccaaaaagtgcactaaaagcatctataggattataaccagcaacacctagtactattgatgcaacaataaatccacagaatattgcaatgaatgttgaagtaactggttttttaagaatttttactactatcttcactatgtttacctcccgccattagcaagcctattgtattttcatcaacttcaccttgtttaaaagtacctacaatagttccttccgaaattacagctatagtatctgaaacattcataacttcatcaagttctaatgaaattaaaagaacagcttttcctttatctctttctcttattaatgttttatgaacatattcaattgctcctacatcaagtccacgagttggctgcactgcaattaataagtctggatcattatatacttctcttgcaattataactttttgctgatttcctcccgatagccctctgataggtgatgattcacagttatcaggtcttatatcatactgatttataagctccttagtatgagccataattttatctttaaccaataatccattcttacaatatggttcacttttatatttttctattaccatattttcagcaacactaaaatctagcacaagcccacgtttttgcctgtcttcatgtattgttgaaactttatttttgataacgttttccactgtagtattttgtatctctactccatttattttaatggtacctttttcggatttagcaagacaagttatagcttcaattaattctttttgtccattgccgtcaattcctgcaataccaacgatttcacctttacgtactttaagtgataaatctttaactgcatctaactttctttcatcttttacagttaaattatctatttcaaaaacaacctcatctggttttgcggcttctttgtcaacgattaacttgactgcatgacctaccatcattgttgcaagatcttctcttgttacttccttaacatttactgtatctatatattttcctctacgtattattgtacaaacatcagaagactcctttatttcttttaatttgtgtgtaattataattattgtttttccatcagcaataaggttatgcatgatgcctattaaatcttgaatttcttgtggagtaagaaccgctgtcggctcgtccaatattaataaatcagctccacgatataaagcttttaatatttcaatacgctgttgcatacctactgaaatatcttcaatttttgcgtctggatctacatctaatccatactttttaacaatgtttaatatttcttctcgggcttttttcatatctagtattccacatttttttgtaatttcactacctaacactatattttgtgttactgtaaaattttcaactaacataaagtgttgatgaaccattcctattccattttcaatagctatattaggatttttaatatttatcttttcaccattaagatatatttcaccttgatcagcttgatacaatccataaaggatattcataagtgtacttttgcctgcaccattttctcctagcagtgcatgaattgtaccttttttaatatcaaggttgatattatctaaagcacagaacgagccaaacgtttttgtaatcccacgcatttgtactgcatattgtttgctaatttccatacctaatcctcctctattatataaggctttaccggcaaaccgttaagttaccagcaaagcctacctccactactgtcttaatagttattatctactttaagtttaaattattatttttttaaaaagtcattgtaagtttgttcattgtaaggtggcacaattgtaccatttttaatcttgtcttgaacttccatagttgctttatatactgctggatccatatttttgttttcagttggaattcctacagcattttcttttaatccataagtataagttttaccaccaattttgtttccagtcatagcttctttagaaacattttcaactgcaacacttgcaagttttagtgctgatgttaatacattatcaggagctaaatatgcttgatcacggtcaacacctattgcaaatttatttgcttctttagctgcttcaattacacctacaccaactccacctgctgcatggaatacgatatcgcatccagaagagaacatcttgtttgcaattgctttaccttttgatgcatcagagaaactttcagcatattgaacatctacagtaatatctttacctaattcttttgctgcatattgaacaccagcttggtatccatattggaattgatctataattccactttttattcctccaacaaatccaactttacctgtttttgttgttttagcagctgcataacctaccataaatgaaggttcttgtgcattaaacataacgcctgtaacattagctggagtatcatctccatatgaattatcaactatagcataactaacatctggatttgcttttgctgcctttgttattgcatctgacattgcaaaaccaataccccaaactaatttattgccagcatcaacagctttatctaggtttgtagcataatctgattcttgcttagattcaagatagcttactttacctccagcattattcttttcaaaattctgcaatccttcccatgaagattgattgaaggattggtcatttacaccacctgtatcagttaccattgcaactttaaattctttattaccactagtagttcctttatcagttgtattgcttcctccacttgatccgcaaccagccatagttcccataatcattgttgtcattaataatgcaattacttttttcatgatacttcctcctataaactttattattttgctatttcaagagcaattttcatcatttctgtaaaacttaattgtctatcttctgctgaaagtgattctcctgttaatactgagtctgaaattgtaagtaaacataacgcattctttcctgcttctgcagcattcatataaagtgcagctgcttccatttctattgctaggactcccatgctcttccacttttctgttgctgttttatcagcactataaaaagtatcagaagataatatgtttcctacaacaacatttatattgttttcttttgctgcttcaactgcactgctaactaaatcaaaacttgcaataggagcaaaagttcctggcaaattatattgatgcgcgtagttagaattagtagatgcgcctaaaccgattacaacatcacgtaggtgcaatttctcagatatacttcctgctgttccaattctaataatattatctacaccatagaaattaaataattcatagctataaatgcctatagatggcattcccatgccgcctcccataactgaaacacgctttcctttataagttccagtatatccaagcatatttcttactgtattaaattgagtaacatcttcaagaaagttttctgcaataaatttagctcttaaagggtctcctggcattaatactgtttttgctatttctcctagctttgccccattatggggagttggtacatttgtcatatttctgtcctccaaaatcttgtttttaatattgtaaaatgttcttttcacctattttaatcttcattagaactgactttttaaatatctctgatgcaaattgtatacaaggccctcctattagggctgcaataaccgttacagcccctgcttttcctcctagtataaaaccaattataagcgatgtaacatcacaaattatctttgccgttctatattgagatttcattttgtcctttaatatcatagctaaacttgtaaaaggatctaatccaatatttattgctataaagattcctaatcctgtaaacagcattaaggatccacatacagaacttaatattctccactctaaaacattaggcaaattcatatattcataaaactttgaacctattccaacgaaggttcccattggaatagtatatatgaatgttcctatatttatatactttctgttaattaataacgataatattattattgcgtaatttaccacatttgttgtcattccaagttcactttgtggaagaccaattgcactacgaactccatcatatagaattgcaactgcatcatttccaagcattgcagctgaattaaatgcaattccaaatccaacaagggaaactccaactaacgctattaaaatatttataagaagaactttaagtgatttttcctttagcgtattaactgtactcatcattagttaaatatccttcctgtaatactatactaacttgcttagtactgattcaccaattgtattctcaggcatctttactccaaagttttctgctattgtagcaccaattgctgcaaagctatcgcttgtttccattaatccactttcagtcatagatggagaataagctaagaaaggaacatgttcacgtgtatgatctgatcctttataagttggatcattaccatggtctgctgtaattattaataaatcatcttcttttaatttatctaatacttttcctaaattaacatcaaacttttctaattcttcagcataaccaactggatttcttctgtgtccccataaagcatcaaagtctactaagttaacaaagcacgatcctttaaattctttatccattatttctaaagtttgttccattccatgaacagaactttttgatttatttgattctgttataccttcaccatcaaatatatcatttatttttccaacggatattgaagcaaatccattatcttttaatgcattcaatgcagtagctccatatggttttaaagcataatcatgtctattacttgtacgtttgaattcaccttttttcattcctaaatatggtcttgcaataactcttccaactttccattcatctttaagagttaattctcttgcaatctcacagcaacgataaagttcatctaaaccaaaagtttcttcatgaccacatatttgtaaaacagaatcagctgaagtataaacgatcatatcgcctgtttttatttgatgttcgccaagttcatctaatatttctgttccactagcacttttatttccaactattttgtgacctgttctcttttcaagttcatctaataactcttgtggaaaaccagtatcagtaaatgtttggaatggtgtctctatttttaaccccatcatttcccagtggccagtcattgtatcttttccaacacttgcttccctcatcttcataaaatgagctaaaggcttttcaactgcttcaacatgtttgattggatgtaaattagctaaccctaacttttgtaagtttggaatcttaaattcatttaccgactctgatatatgcttaagtgtgtctacattaacatcaccatactcttttgaatcactcatttctccaattccaagtgaatctattactattgtgaaaattctattatatttcttcataactccatcctttcaaaactaattaagtttatatttcattttatatttaatacttattccaagagtaaaaatttattattttagatcttcctctgtaaaggacattggtaataattcttcgatatcagtaattttttcagtctttttattagataaaactattggagtatgtttttctaataattcaactaaaacttgcctgcatgcaccacaaggagttgctagcgtatttccatcacttacaatggcaattgcttttacatcctctttgcgatacccatttgaatatgcttgaaagattgcatttctctctgcacaatttgttaaaccataagatgcattttcaatgtttgctcctataaagtacttattatctttagtaacaacacaagaaccaaccttataatttgaataaggagaatatgcattttccatagctttaaaagctctttctaaaatatcttcatactctttcatttcatattcctttccgaaagatcaaacactttcttatttagtttctctctctttgtcagcttttattaattttctaattccttcaattgcaacttctatagctgtttctgtatcatgcacttgcaaattttcaagtcctgccttttcacgttcttgatttgcaacaactaaaaatactgaacctactcttacttttaaatagcttcctactacaaataaagctgctgattccatttcagaagcaaggcatccgcatttcatccatgcatcccacttgtttaaaagatcataacttactggtttagtttctggcgaatgttgaccataaaatgagtccttacattgaactactccaacatgataatttttatttaaatctttagacgcttgcacgagtaggcttgcaacatcgaagtttgcaatagctggaaattcaattggtgcatattctttactagtaccttctgctctaattgcaccagtagcaataactacatcgccacctttaacatttatgtccattcctccacatgtaccaactcttacgaaagtatctgctccgcaatttactagttcttctaatgctatagcagctgatggtccaccaattcctgttgaagtaacacttacttttacaccatctaaaaatccagtgtaagtaacatactctctattatcagcaattaattttggatcatcaaagtatgcagcaatctttttacatctctttggatcccctggtaatattacgtatttacctacatctccttctctcacatctatatgatattgtttcccagaaccttgtgaataattcattataatacctccatttatttcacgattcgctttcagaatacggtttcaacattacgttaaaaaatgttggacatccctaatacttgtctattaagttgtattattgtttgtactcaaagaatagcatgtctgttatttcatgtcaagcattttattcatgataaattccgaaaattcattcaattttaaaactatgccaaaagcctgttggtacaagctttcagaaggacaggctgtgcacaaaataaccataataatttaattgccaatattgtttaattgacgttataattaagtataaaacaaatatttcagttgaaaatttgtaattcaatatgtatacttgtctagacagggttatatctgtagaaaggtgatatttttatgaatgatgaatttgatatagttgaaaagccaaaagaattaagatatgtaagtgtatataatcaactttttaaaatgataaatgaaggtacttttccagaaggaagtagattaccctctgaacctgaactatctaaattaattggtgttagtagaactacgctaaggcaggcacttgcactactacaagatgatggattagtaaataatataagaggtaagggaaattttatagtaaaatctaaacctaaaaaagatcttggtttagaaacaatgggacatcccgtatacaagtgcataaatgatgtcattgatgaagttaaaattcaattaaggatagagccatctactgactattttaatcaaattcttgtaaagaaaactgctgctgtagtgttaatagatagatggtataaatctgaaggtcaagctatagcttatacgtttactttgctaccaattgaaactatttcaaaatttaatcttgatttaaacaatgaggatatgattttagaatttctagaaagagatatttacgaaatatctagtgatatattagttgaaataaagtattcaacttctggaaactttgctgctaaaacgtatccaatttcgccagaaaatcaatttcatcttatacaggaaactctttataaagattcagaatttcctattgcttctaataagcattatttaccgataaaaacaagttcgattaagtttcatcctaaaaaacaataggttaattatagatactcaactttaaattcggacttatgcgacaacccaccgaaagcagaaacattgttatttcgcaggactatgaaaatttcgctgaaagtgctaaattgcaggttgcaccaactaatgcttgctcccaatttcattgtgacaagcattagttgaacaacctacaattaagtactttggctagctcattttcaatgcctgctgcataaaaatgtttctgctttctaatatggtattttatcgcaaagtataaatcaaatccttaagttgtttatctatattatgaatatcatcatttgtaataagaacaaaattaatataattcttgttatttagttgcttgcattggaaatcattcagtatgtatgttgaaatagtgaactcaccttaaaattctagtaaattgagtacttaactaagattaaatcgtgtgtgctcgattgcaatataataattataaaatagcatttgttttataattattgtatgttcatatctcaggccatatgcttcaggaattaaaataagaatgatttactaaaattaataaatcattctaagtttgtcgtgaaatttatttaataaggagaaataatatttcaactacactatattatatactatagaataagcgcttgaatcgtgttaaaaatcaagaaatttattttgagcatattaatattatccatagcgatttaaagaaatgggcgaatttgtttaatgttgctgcaataaaatatataagcaaaattatactaaatggcccaaagtaacgaaaaacattcatgtattaaaataaaggatttaaaaaatagagatccattatatgtacaatatgcgttatattttgcaaattatgttataataagtgttattaaaaactgtaatctaataaacaatatttaattattacgtatttataggatggagaatatatatgggaatacaggtattaatagcatgtattgcaaccattgcagttgttatatttcaagtagtttttacgatgtgggaatctaatccttataaaaaggtttattataaacttcttttagaattgagtaaatctcctaatgatcctgaattgaaggaaagagctatagaagcaggaaatcaatattatagtagaataaaatcttattcaataggaagttttaaaggtgctgtagcttctgcaagggtgaagacgttaataggtccaatagatgaaaagatattatttgaagatatgactagaatagttgagatagataggcattaatatgaaatattaatttatgaattagcaaaaaactgatgaacaatgttcttatattgagtatcacaggtgggcaatcccacctataatttttataatactatatttcaactctatattaaagaatagcattttacaaaaatactgtgataagtgaaattgctgaaactatttggattaaggcaattgctaaggcataaagtgcagctttctttcctatttttataagctgtctaaaattcactctcatccctattccagcaagagcaattacttcaaagttgctacttattaatttaaatatattagaaatatccattggaaaaactccagcagtaaatgctaagcacataaggaaaaaggccaatacataccaaggtatttttatttttgaatttaattttccactttctactctactagatttatttttcatttttcctaatattaatacaacaacaactaaaaatattattcttactattttaaatattgtagataaatccttaacttgttcatttactagacttgcactaccaacaacttgtcctacagattgaagtattcctcctattaaagcggaggtttttattgtctctaatgaaaatatcactttagctataaatggaagaacaagcatcaatactgttcctgtaacatttactatagttattgctatgcctttttcactatcccctgctcctattactggtgcagtagctgctatagctgaagatccacaaactgcatttccacttgccattaaaaaactaaagttctctgaaaatttaagctttttcccaattaaaattacaagtgctatagtaatgctcatttgaaatactataaatgagattcctgaaaaacctaattttaatatagtttgaattcccaatgttccgcctaacagaactatagaatatgacaatagttcactttctgcgaattttgatcccttttgatatatttttctattgcaaaatgtatttcctgctgccatcccaatgaagattgctaaagatgccgcccctatgctaggtacataattacttaaatactttgctataaatgcgattattgtacatattataactcctggtaaaacttctaaaaccttatccattcctcttgataatttcttatctctaattatatttaaactcattcatatcaccttctaaaatatttatctgaatatgaagtacttctttttctatttttagtatattaggtgtataatcataagtaaaatatatatattctataataatgattaagaatattaatgattaagaaaggatgattccatgcttgatgaattaaaaacttttatagcagttgttgaatataaaaacttcactaaagctgctgaatctattaatctatcccaacctagtgtaagtttacatattaagcatctcgaggagtattttaatacaactttaattcaacgttctataaaacagaaaaatataaacataactcaatctgggtatttactctatgagcgttcaaaacaaatgattaagctactaaatgatactaaaaatgatctgttaggttatggggatgttgtaaaaggtcagctgcatataggggccagttttactataggagaatacttactaccagcctttttaggaaaatttgcaaaggcctatcctgaattagaattagaagtgacaattgaaaacacacataacatatgtgaaaaagtcaagaatcttcaagttgacattgctctagttgaaggtactgttcctccttcccactttacgatcgaaaagttttatactgacaagatggaagttgctgttccgtacaatcactacttagttaataactatttttcagccgaggatctgcaaaatcagacttggattagtagggagataggatctggtactcgtcaatatttgaatcttttcttatcaaataataatattaacgctaaaaatatcattgtttttggaagtaattattctgtaaaagaagctgttaaaaacaatttaggaataacttttatttcttcacttgtaattgagaattccttaaaaaataatgaaatttccaccttaaaaaccaaacaaacttacactcgtccattttcatatgtaatgcaaaaaggtataatcccctcaaaaggaacactagtgtttatagatatgctaaagaactatgtaaaaactctataaaaatagaagaatgaaaaacattaactttagatttatgcgataatctacccaaagtagaaacattgttctatgaaaatttcgctgaaagtgctaaataaaaggttgcatcactaatgcttgctcccaatttcctagggaggttcgagaacccaaaagaaaattttgggctctcacttcacaagcattagtagtgcaacctacaatcaaggacttttaacagcttatttccaaatttctgctgcatattatgaccattgaggttataaaaatatttctattttccagttatgatatatttcatagtataaatctaacttataatttgtttatctatgtctttatagatttccaaaacaagaatttgacatattagacgaacatatttacaaagttgctaaaactttgagttcatatcttcactagaaatcataaatatatttgtgtagaaaacatttgaaaatgagatgtcaaaggttcttagctgtaggttgttccattttagcttgtcaaacttaaagttggagcatgctaaaatgatacaacctgctgcttagaaccttcagcgatattttcatagcttttcggaatcaaaatatttatgatttggtaagtagactagggaatcacttccctaacccctctcagaaccgtacgtgcggatttcccgcatacggctccccacattataattcacagtatatatgatatatcttcttttaagttgaaaatattaacatatattttagctttaggtattttgaagcactcaaacatagtgtcaaaacttctccagttataacttcttttctgacttcttttgtttagccatttaaaagttagttttcttactaaatatctgaaagttgcgagacttaaactgttgtcagtgattccgtaatacctataatatcctattagtctctgtgtcagtttctccattaataatgtgagcggcactgttctattattctttaaccattcattcaatctctttatgctagctccaaatttctttgagctagtcttcctcttaactctaaaacttccattctttctgcaactgcagaagtgtgtaaatcctagaaaatcaaaagttctatctttatatgattctaactttcatgctctcttgaattttctatcatagtaggcattcttaccgaaatataatattttagttttatcttcagctacctgcaagttaaatttgtctaatctgtttttcaatgcttcatagaaagctttcgcttcgtcttcatactgaaaacagcaaacaaaatcatccgcatagcgtactatgtaagcctgtcctttacacttctttttgataaagttattaaaccatatatctaaaacataatgtaaataaatgtttgctaatgttggagatattattcccccttgtggagttccttcatatactttataaaactttccgttttccattattccagttttcaaaaatctacctatatatctaagtaagttcttgtctgcaatcctgtgttcaagaaatttcatcaaccacttgtggtcaacattatcaaagaatcctttgatatcagcatctacaacataattcacattcttttcagataaatatacatttaagattttaagagcatcatgacaacttctattttgtctaaacccaaaagaactatcaatgaaatcttgttcatatattgattttaatattttattaatggctaattgtacaactttgtcttcatatgccggtatacctagaggtcttttcttgtttgaaccagacttatctatgtatactctccttacaggctgcggtctatatttaaaagtcttcattctaattagtagattatcaatattattctctaagttagttccatattcttcctttgttaccttatccactcctgtagccttatttccgctcagttcataatggcataaaattagcatttccttgttaactaaatgcattagtgatgtaaatttctctttaggattatttccagctatttctgctatcctctcaagttttgtgtacattttttttcctcctctgtgtgagaatttctgtttctcttttcaaggtctataatatgttacacccttccctccatggtcattactcatttcttcagtactatggtgtaatccgactactcattatcatttgaatacctctgatttctaatcattgttttccatactctgaagtcagagaataatgagtcctcccaagttgacgtactatatcaatgtataccatgctacaccttaaaaccacgagaaagcacagatattcttgcaataatgattatctatgttctgacttctaatttaccgatattatcgtcctttctgactttgtgataatttcgtggctagtagtttcagcattcgcttgcggcctggtaccttgtttgtctacacttaacttattacatcgccataataagcccaagactaactaatgactggttgctggcctttgtcatgcaggattcccacctgctatatagtaataatgaggaaggttagccctcattatcttttacgcccttgcttggcgtaccggtaagatatcacataaatttagttttaaagttgggtatctataattacttaacctatattctttagaaatgttttataatcctcatagtttctttttaaaagatttggagtatcaagaccataaggacaatgagccttacagttaccacactctatacaatcttcaatctttttcattttagcttggccttcccctgaaagaagcccctcagttggagatctacgaagaagtaaggacattcttgcacaattattaatttctatgcctgctggacatggcatgcaatatccacagccacgacaaaactcacctacaagctcttttctctcattttcaatgaattctttaatttcctctgtcattgcagggggattgtctatatatgagataaattcatctaattcattttctctttgaactccccagataggtaaagtattatcaaattgagaaaggtatgcgtaagctgcatcacttcttgttataagcccacctgataatgccttcatgcagatatatccaacattcttctctttacataaatttactagatcctcatcctttttatcagcaagatagctaaatgggaactgtaacgtatcataaagacctgattcaacagcttctatagctactggtaatctatgatttgtaattcctatgaaacgaatctttccttgtttttttgcttctagcatagcctcatatagacctgtcccatcattaggtttaggacagaaacttggattatggaactgataaatatctatataatctgttttaagcatagcaagactcttttctaaatcactccagaaaccttcaacagtagttgatggtgttttcgttgcaataattattttatctctaacatcacttaaagcaagaccaattttatactcgctgtcagtgtaacttcttgctgagtcaaaaaaattaataccattatcgtaagctttcctcaacaattttactgcttcttcgttagagacacgctgaacagggagagcaccaaatccatttctatttactactatcccagttcttcctagcgtaacatttaccatattatcatcgcctttctcgcaattccataaatatattggttatattaacctatttacttgatattatatcacctagagttaacttcaagtcaagaataaaacctaagtaaatatctgagttaaaataatgtatgcctatttcaatttcacctttagtaaattaattattattgaaacattggcccggtatatgattcatatggaagtaaaactgccactcctgtttcatctgatttataggataccccttcaagaggatttctatctttaactaaattcattcctacggtatatattgtattagtcatatcagttgtttcttgtgaagcagtacccaacatgaagccttttgaaaccagttctttagcttcagatactccatctagaccgacaactatgattgacttagatttatttccggtattgtaaccatatttttgcaacgcttgaacagcaccgattgccatagagtcatcatttgaaattattgcttctattttgttaccatatcttaagaataatgcatcaacagaatctttagcaaatgttgtgttccaattcaaaataggagatgcaagttgttcggtttttataaaagcttgattaatagttgaaacggagtattttgatctatcgatggaggttttattaagtttttcgccaacgagcaatacatattgtaatacatcatctttatttttatcaatcaattctttatgcttgttccaagcatcaacaatcattttcccttgtacagtaccgccttgtactgaatctgttcctacataaaaagcctttttatacgatttaattgcttccattgaaaatggtactctattaaagaatactattgggatgttatatttagagattttgttaatcatatctcgtatttcaagtagattaaccatatctagtaatataagatcaatgccgttatgaagtgcattttcaatatctgtattttgtgttgattgattataattagcattataaaaagagaattcaacttctccaggattattcttttgaatatcttcaaaatttttgcgaaggagtatcatgtaatcatcattaaggtctcttgtaaataagcccactctaacagtagagccttgacgatagtttgtgctggcattcgtagtcatatatgaattatttccaagcattataaccaatataattgcaagtaaggctatacttaatattctcttaaatgcttccatttaaatccttcttcccatctgttgtataattttattatgtctttataaaaaaaagtttatgctatttaatgttaatttgtagtggaagagttggtggtaatagttatctattatctgaagcatttattaaaggagcaatacaatcagatcatgaagtagtcaaatatgaagttggaaagaaaaatataaaaggatgtattgcctgtgacacttgcttcagtaaaggaactccttgctcatttgatgatgactttaacgctctcgctcctgaaatagaaaaagcagatgtgattgtttttgcaactccattatattggtatacattcccttctaatcatcttaatatactcctcttcatacgttctatactagaattatgcagtaaaaaaatcgcaaattcaatttcttgaataatgcgatttttaaaaatagaactaatttaaaataatactatatttaataattttgaaccaataatttatcaatcttatctgtggtagcaccactagcatctaaataatgtccattaattgttgtattagtagccattgtgccatcactagaaatgtaataaaatttaaatgtgtttttttgtcccttatgggttgttacatcttcaatccaacaatcggttaacattttaccttcaccatgatcaagtttatttaaataataccatttcccatttatatatttccagcctttttgcattttcatatttttaggtgaaaaataataccaatctccgcctatttgtttccaacctgaaatttttgaaccatcatcatttaaataataccaatccgtagctgtaaaatcctcggaagcgtcaatttctttttgccaatgtattgaaggattagtttcaacttttgtagtaattgaagattctttagttgcaacccggaaatcaccagcaggagcatttggatctacatagtctccttccgctattactttaatatattttcctacatcctctttttctagagtatactgattttgcttgtttttatctttagaactaggaccaccataaattgattgtgaagcacttgttggatattcaagacactcccaaccaataacacaatatttagttatgtctcgtccacttgcatccctaactatagctgttaacgtctgtccttcaatcaaatttccttgaatctctactgatgacataatgtgtttttctttttcagcatagctttttgtagctgcatttacttccacaataccactaccattaaataatttagctgaaatacccgatagttgtaatattgttgttgttaaaaacaatgataaagtctttataagcattttatttttcattaaaaatcccctttttttcttattaatgtatatattttaccattaaaaataaaaaattggaataattatataattatgcaaataggataataagtagtttctatcatatttattctatttttaaagagcacttttcaatatactatgtcaaatctacatactgtgtattatcttgtcatagctcataaaaaaaatcgcaaattcaatttctgaataaaaggatcacctgctaatatacccatattatatagatataaagcaaaacttaccatatcattgttatatggtaagtttgtagaattctcatttcatcttatctttcaaaaatgtatatactctaatttaatcttcataaaggtgtttattagtatttatataattttctccccagatgttcatagaatccaaaactggctttaagctcttccctagttctgaaagtgagtattcaaccctaggtggcacttcaggatatacctttctaataattaatccatcagcttccatttgtcgaagctgctgtgttaacattttttgacttatcccattaattccattctcaagttggttaaatctttgtgttccatcatcatgtaaatttcttaaaataagaactttccacttgtgtccaataagtttaacagtctcttcaattggacataacttaccacatgtcatcagcattcactcctatcatatataaattgatacttactatttagttcgtaccatacaaaatagtgccttcttgtaaaaagttaatagtgattatattataataccataagtcaacaaagcatgggaggaaatctattatgaaaaaatcaaatgtgtctttaccataaaatagaattttaataattagttaaataaatattataaattaaggaggcgtataactatgaaaactttgaatattaacgatattacagaaaaaatcaaaaggaaagcactgtttacagagggcacaatggactcaggtattttattctacgaacctggtgaaacaatgactcctcacaaacattcagatttagatgaaatattctatgtaattagtggcaaaggaataataactataaatggcaaggatttttcaattaaagagaatgatgtaatgttatctccacatgaagaaagccatggtttcacaaataatggagatgaaaaattagtaatcttacaaataaaaaacaccattatgaagtaattgcaatatctataatcattagaataaaagatttagaagcttttattctaatgattactatttcaaaacatataagaaaggatgtattattatatgtactatatatctatgataatcacagttttagcaactgtaatatataatatcagtcaaaaatctatcaatcaatcaacaaatccatttatatcaatgatagtcacatatattaccgcaataatattctctatattagcattaatcattttacccatagaccgcaatattataagctctctaaaacaattaaattgggcaagttatgtattagggatatctgcattaggcctggaaataggatatttatatatctatagaagtggatggaatatagccgttgctcctctttttgtaagcataatttcaacaataatattaattgtcgttggtattttcatttataaaactaaactatcccctatgaatgctctaggaatatgtttaagtatagcaggattaattctaatgaataaaaagtaaaagacagtcctgaaatatgaaatgaattaataaattaatggattcttccttcggcaccatagctgattatcgtagtattataatcacaaacaatgagatactctcgattccttggagtggtgtcgccgacattgctaacaaaacccgcgctaaagttaaaggttgcttaaagtagctatcttccccactttaagcaaccttttattgaattgaattcataagctcaaagaaatattttgactctttggttttataaagattgtaccaagaatctagggtttgcggagagaacacatctagaattttaaatatatgcaaagcaaattcaagaggagctattccagaagcagtaatcaaacttccatcagttactacacattcctgcttataatacatctctccatcatagtttgggcataccattttaagatacccaaggtcattgcttgtatgatctcgcttatctagtactccctccatagcaagtcctattgtagcaccacaaattgcccctacaacaatacctttctctaaatatttttcagccattcgtataattggagcatgaattgcttctgtccatgtattcccaccaggtagaatcaaagcagcagtatcttcaatactacactccttaagttcaatttctggcaatattgtaagacctcccattgtagtaataggggccttggtaattcctacagtcactacttttagtggcattactccctttttgtagtaccttcccgaattgatttcagcgattaaataacctatttcccagtctgccattgtatcaaatacataaagatatactgtattcttcattttctattcctccacattcattttatctgatatctaggaactatcaaaaagttaattcattataaaccttcttattgaattaaatatttttaacttaagctcatcatctttcttagcttcatcaaatactgcgcctagatcattcttattatatagatcactataatttaattttaagtatttctctactgaatttattaaatttatatctaattctttatcttttattaccataattatcattccttttatcacaatatttattagcacaaaatgaatttcattatattttaaatagtatccacttacactcttctatatcatacttaagctcaaatattttctcgattcctccaatcattgaactgcaagtgaatacccacattttattaccacatagcttttctaaatctatacttattattcttcctactttaataatttcgcatttattttcttcctcaattttgaatcttaatggttttattttcccatcttcttcgaaatgtgctatcatctcaatcttctttgaaacaactttcattacctacacttcctcacaatatgctgctcatcattggataatcttcatgtgaaccagttcccccattaatcggtctcactcctgagtgtagaaaagttgatctaataacgctttccttaccatatttatttcttaaatcatctaaagtttgatctagcttcctttgcttttcgtttttttcatagtcaaatagattctcttgataatatacattgctgcgaagcttagttactcttactcctaattgtcttattttttcacctttccaagcttctttaaatgcttctttaattccctcaaagattttagttgttgagtctgtaaagtcatttaatggcttttgatgagaataataattaaattgattagttttaatgctcacaacaacaagactacataaactattactagatctaagcctcatagctacactttctgtaagagataatagtattttaaacgcttcatccatagtctctacatcataagcaatagttgttgaatttcctattcctttaacttctaaataattagaatcccttacttctgaattatcgattccattagcatattcatatataagtttcccatgagaatgcaatttacttattaataaatttacatcagtatctgctaattcccctattgtattaatatttaatttatgaagttttgcagcacttgcacgaccaaccataaacaaatcctctacaggtaaattccacatttttgtgtgcatttcatgcttaaataaagtgtgtatgcagtttttaggtttaaaatcactagccatcttagcaagtaatttatttgttgaaattccaatattgcaattgaaacctaactcttcacttattctcatttttaatctcatggctactcttttataattctcttttaaatgtgtacaatccataaaacattcatcaatactatatctttggatctttggagaatattcagtaagcagttcatatagcgcatcacttgatttcacataccaattataatctggaggataaatcatgagattgttgcatttaagctttgctgaatatattggttctcctgttttaataccatacttttttgctggtatcgaagcagccaaaattattccatgcctgttttcttcactacctccaattactgaaggaacttcacgtatatcaagttgacttccgtattgcaaaagctttactgcagtccatgaaagatatgctgaattcacatcaatatgaaaaatcaatttatcttcactaaaatccataaaaccaactccaaacatatgttcttttgagtatattatattgaacatacgttctcttgtaaagaaattttttctcttaccctttccaaactttcttatataatcatctatttccgttaaattcatgcttttagttacaaaaaatattgctgtataatacaaattatccaaataaagtgatagaaagtttctgatatctctcagagttatttaaatatttgtccaagttataattcctcataaaataaataaatgctaccatagttaataactctgatagcatttattcaaaagaattatagataaactaataaaagccttaatttatgcgtatataacgctgaaagtagaaatattgttatttcgcaggactatgaaaatttcgctgaaagtactaaattgaagattattccacttcttcagcgaatgtaatgattcgagctttcctatttcccatagcatcagccatactgtaataatcttaatgcaaccattaactttatgtgagaacttctttatgtaccactacctgattctacttaagaagtattccctcataaattagtatatttagcttagaacttcttaatttgctatattacttcatttatctgattttaataatataaccttgatatccaatatacttccattaagcactgctttaacactaccattcattttctcacaaagtttttttactatagacaatccaagtccagttgttgttttatttctagacgtatcagccacataaaatttatcaaataaattatccgtatctattttttctgtttctttcactttatttgcaaatgatagtactatattttcctcttcttcactaatattaacttttacatttccatacgaatgaactaagcagttctttataagattttcaattatacgctttatcatttcttcattcccaacaacataaaaaggctgctcagtatttatttcaacctttatatctttcttttcaaattcatatatataattcacaatactattgcataaagtattggttaaattaactttagaaagttcaatattatcatcagatatttcgaggtatgaaagttcgaaaaaacaatttataagcttgtctaattgatctatatgttttattatcgtttcagaagttttcttttgtttttcttcttgtaaattcctaattaagagttccatatatcctttgacagcagtaagtggagttcttaaatcattaactgagaataatcatctaacttgcatccaataaccctagagttacaccaataggcttcttcttcaaatacaataaaaaaacttgcaatttcacttacactaaagattttaaggttattttgcaaattagaaatcattactccaataaatttgtcccatttttttataatttttccagaaaaaatattttatcattcataaaatgaatttctttgtccatttttaaatccataatttgaaaatcattcatattgttactacacctcaacatccgcaaatagcctttttttatattattctctaattacatttataatagttatttattgttaagaatatcataaaagtgttaaggccatattatgctaaagataaaagagtgcttattatagtatcttaactattttttccgtgtctcattaaatttaataatcgaaataagtcctatgtctattattacttttataattagtttatctaatattagataaactaaaacaacaaaaagcagtagctggattgctcctgccactgcttttaatattattttccaagagatattctatttttatataatcttcatttatttgaattatctataaatcactaatttattaattaacaacattcaattttatctatacatccagcaatcttttcttttactctataactttccaattcaacttcaatcatcatatcatcttcttagttaaaaatcccaccatgaagaaaacggaacatttatatttgaatctaatagcactgttttgccgattttaggggctattaaactaatctctgactttttggcctcctttaatgctcgttctattggttctttccaaccatgataggctaaggtaaatgcactccaatgcattaacatcatattcctaccctttacatctaagtgagcatgaacggcttcttctggtttcatatgcgcccaaaaccaacgtctgtcatattgagctccctcaatcaaagtaatatcaaaaggaccatatttttctcctattttcttaaaatgtgaatcatatcctccatcaccactataatataaatttatgttttttccgataattgcatatcctccccatagagttgcatctgagccaaatattcctctttttgaaaaatgtcttgatggtgttaatgcaattgttaaaccttgataattcatttcatcccaccaattaagctctgtaattttttccttagaaataccccatcgcattaaatgagaacttacccctagaggaacaaagaaatgtgatactttactgcttagttttacaatagatttataatctaaatgatcataatggtcatgtgatataaagattgcatcaataggtggaattttatcaataatatccaaaatattttcactatatttatattttttacttcccgcaaatgaaactggtgatgcaatggtacttaaaattgggtctagcatcagttttttattatcgatgctaagtaaaaaggatgaatgaccaagccaagtcaaactatctttttcacttttgatcttttcccaatcaattgattccacaggaatttcaccatgaggctttcgattttcagcgcctgtaatcgaatctttaagcattgataaaatatctgaagcactcatgcccaaacccgttggagtttcattaacaaattttccattaacataattatctaaattcttataaaattcttgttgttcttttttaggctttccgccgaaagctgggtttaattttataaacgctgtaataccaacgcataataaaattataaaactgaatatatatataatcatttttgttcctcctatatcttcatttgttgaaattacttcattaattagcttattatatttaaaatgttgtttttatttactaattatcttttgcacattacctatataagaaaaatatctacaaaaattctagttcgctaaaggcttttataaattcttttactccataattctcgaattcaacttcaatcatcatatcatcttcttttaggacttttcctgttccgtatttcttgtggcttacctttttagttgttgtctcatttatttcttcaactactggtaattccactgcttcattagctgaaatttcctctttatttcctttagcctttgcctcttgaatttgtttttttagttcttgaagatttacattattatttttaaccttatcattttgaattaatttctctggaatcatatgaatatatctactttctccaggggctgctttttgataatctggatttgtgtaataggataactctaagtaatcttttgcccttgtaattccaacaaaaaataatctttgttcctcttcttcctccatatctcttgtatgaagtggaattaatccataattaactcctgtaataaacacataagaaaactctaaacctttagaggcatgtaaggtcataagcttaacagaatctatattgctatttatatccttctttaaaatatttaccccatataaagctgatgaatttataaactctctaagtccatctaagaatatcatctgtttttctttcacatattctataattatattaagcaatgcatttatagcttctttatcctctatatatgtagctgaagttggctttatatatttatcaaattcaaaataattataaatctcttctgccatcttaatttcagaacatttactaataaattcatgcatcttttctagtagttctgatttaattatgttctgctctttaactattttccttgcagtcttttctgtcattttctctccatattctttattgctaagaacataaattgcagaggaaaaatcattaggatttacgcaaaaacgaaataatttaatcatccaatttaacactggactgtcacttatggttttcttcatagatacttcaaaaggaatatcattttttaaaaacacatcttcaaagacctgagactggttttgcagtctataaaaaattgcaatctccttataaggcacacctgatttatgtatttccttgatcttatctgccaaataacacgcttcattaaaaggattataatgatttttaactataattttattttcagtttctctagcgcccattaagcgacttccattttgctgaaagcatcttgctgcttctaaaatagcattacttgaacggtaatttattggaagagaaagctcctttgcattatatttatgctttaaggtataaaccacatttaaagaacttccacgccaactgtaaataacctgatttggatcaccaactgcaaataatttagtattttcaccttttaatttatcaataaaatcaagctgtattttatcgctgtcttgaacctcatcaataataatccacttaggttctattttatgctcacctaataataaatttgcattttgcaatatatctgaaaaagacatcttattttgttttatcttctcttcttttagcagctctgcaagcttaaaaatatcatcatcataaggcgaaatcttttcctcttccttttcaataaccatagcttgctcaagtctcttttttaaacggttcttatatttaattttgagcttttcttcttggattatctgcaaggcaatgtctaattcctcatctggctctattactaaaaagtctttttcatattttattttttcaattggcaatacttctttaagtaaattaagggccacactatgaaaggttccaaagccttctaattcctctgcttttatactctcatcagaagccattaatctttctttaatttcatttgcagctttattagtaaaagttaatacaatcatatccttataactgatattttttgcataatgaagatacacgatttttgaaatcaaaactgttgtttttccacttccaacatttgcatttacaacacatgcatcactttcatcaagtactgcttctctttgatattcatttagtctttctagctctttttcataatgcatgttattctcctattctgtaagatcttcatatcttctttgtaatttactttttacattatttctatcttcatctatctcttcaagtctgacacttaattcaattcccattggagcatctgtatggaaagaaataatatttaatatgctctttttattactttcttccattacccattctctataaaatgcattatttaaaactaaaattaaagtacaattatctatttcaaccttaggaattgtacttaaaaattttgcaaatgcatctccattttcctgcatatactcacagaattctttccatttttcctgtaattcatcaaacttaaatgctttcttaataaaggttgatggagcatattgtgctaacttaatatcctttggtgcctctatttcctctaataaattcttaagcccccatagaaccatagctttatttaattgataatctccaatacatgcagcgcagccatcatcacatgtacatcctcctaccatcttaattgcattttcaataatctttgcagttaagtcaaatactttctcagaataaccaagtccacctacgtatttatcataaataaacatataaacttcgctatcataattttgacttatttctattgcattgttagacattacaacacctatgtcttcttgttctgtcatggttgccatcattgctgcatttttaattgcataacatattccttcaaaatgattatttcttataaagcctccattttgactttcctgaaggagccttctatatacagtcacaacattgtcaggaatctttatccaagtgctttctgtatcataatcctttgataatggtttttccaactgttcaaagcctaaattttgatgattatgaaattgcagctttttatacatataaactatttcatcaacatttacatctccaaaagtcactttagtacgctcatattccatacctttgctgccttgaattatccttatatttgttgtgcctcctggcattgtataataatttccattaaaaggaatggcaaaagcagttctactttctaagtcaagctttacaacctgatattgaactccatcgtgcatataaattgctccattatgaatttcacgaaaagcctgcatctcatccatttctgtaatttctttattgttatccttatttataagtttgtaccttgctttatcaatatttcttaagctaaaatctcctgctggaaatgaattaccacaccatgcaaactttccactttgatttgttaattcacttgctctgattaaaacaggaattgtttctcctaaatcagggaaaatcgaaatatcatctaaagttaatgggatttcagcagctgctgcacgtatatgtgcaagttctattaggaggttattcttatcaataactgcattttcacttccactttcaaaaagccagtctggattaattgctatgtactgatcaaaaggcagattatcaaggattaaataattggtactttcttttccgtttctacctgctcttccactctgctgccaaaaggaagctctagttcctgggtatcctacaattactgttgtatcaatttttccaatatctattccaagctctaaagcatttgttgatactaaacctttcagaactccagtaatcattttattttcaatttctttacgctcaagtggagtatatcctcccctgtatccagaaatcttatcttttaaagaagctccaaaaaagttttcagtctctagtttatctcttgcttcttttaatacaacctcaacatttcttcttgattttgcaaaagcaataaaactattatcattttccactaaatcaggtattaaatcagcagcaacggaagttgattgcacctgcccataatattttttatcatggcccataatctttggcggctgcacaagcttataatttttctttggagctggtgaaccatctatgcaaacctcaagaaatttatgtccacagatttcttctgcaagttcaactggatttgctatagttgctgaactgcataagtactgaggagaggaattataatatctgcacaccctgccaagccttctaaatacatttgcaagatgtgaaccaaaagcacctctataagtatgaagttcatcaattacgatatattttaaattagaaaatataaagtcaaaaccaaacttactgtgattcggtaaaaacgcagcatttatcatttcaggattagttaaaataatattagcattttttctaattctgcttcgttcatttacaggagtatccccatcataaactcctgctgaaatcctgttagctccaaagtattctaagtaaggcaaaatagcacgatactgatcacttgcaagggcctttgtaggatatataaaaattgctctagccaaaggatttgatagaatttcttgaataacaggcagcaaaaagctaagagtttttccacttgctgtagaagttgttattacaatattgttcctatccattgctttttcaaacatttctgcttgatgactatacagcttatcaattcccttttgagacaaatactcacataattcctctgataaattacttgggtaatcaacgtaagctgcttctctctttggcattgttttattatatataattaaatcgcttatattcattaaatattgctcctattctcttaagttacaatcaaaaacaaaactccaactctaatctatacttgtgcgtatgcctcaccgaaatgaataatatacttttgttccagtttctagttgggatatacttcaaagattaagtatagcttatagtttgtttatctatattttacaacatagttaattgttttctcatatgtctaaattcctttataattatataccaaagttattaatatttatatcttaatgtgctgggaggaaataatttaaataacgcctaaaaaaggtaataaacattaaaattagatgtttattacctttttttaaattagatgaattcatggttttattatgttaatatgcttttgtaaatttgggatagatgatttgctaaaggctcttttgcttttcttaaatttggagttatcaatgttctagcttcttaacttaatcatattatgctattcttcattatctactaaattttaactaatttcaaatctagtataagaccatttatttttaatagtattttcagcttaagtcatgtgttgaagagatttattagattataacttggtatattccaccatgcatatttatcattggaaataaatcaaaccttaggttaaaaataaaatatctactgtatcatcagcttatatatttaggaataccacgcttacattcaaatgtggatagattaaaactagtgaagaagataagaggttcatagagataaagtaatttacattccattatgagtagattaaaacagttcctatcgtaatcactatcatgggcattatgatctttacattccaatatggatagattaaaactatctgttccataactttagaacttttataataattatttacattccattatgggtagattaaaacggtttaaatactgatgtttcagcagctttaacaagatttacattccaatttggatagattaaaacaagtttttttaaattatctactattataatctactttatttagattccaatttggatagattaaaagtctattgagactataattgttgcaggattaatgatatttacattccaatacggatagattaaaagtctattgagactataactgttgcaggtttaaactctactatatccgatagttatataccttttgtcattatttacatccaggtatggatatattaaggcccacaaaccaatgcttctaagttgtacaacaattcgatttacattccattatgggtagattaaaacagttcctgtcggaatcactatcatgggcattatgatttttacattccaatgtggagatattaaaacatttatttcgcagtttatcattctgcagcaaatacatttacattccaatatggagaaattaaaacagcagatatatttaatgtaacttgcgattatttgctatttacattccaatatggatagattaaaactgtcctaagttttcttgcccatccgcttgtagtcatatttaaattccaatatgtatagattaaaacacatatcatctgcatagaactctgtcatatcacctttatttacattccaatttggataggctgaaacaccgactgtgacagttacgtctactacatcatttaaatttacattcaattatgagtagattaaaactgctttccagtacattatataataatcttgtatttacattccaatatggatagattaaaaccgtaagcgtaaaaaaattaacggatagaaaatgcaatcctccattgttaaaattagcatagattttaacaatggaggtttatttatatgaataataatgaaaatataaattggagagaaatagttgctggcttttcttcttacgaaggaacgttaggaaatttctgcaattcaaatcacattactaaaagtcaattctattactataaaaagaagcttaataatgaaaataataatttacagtttcatgcaatttctatgaaagaaaaaagagtaagaactgagattactgtagttcaagctgatagacctaatataataatagaaataggagtagctaaagtacatgtaccggctaatgaaatagctattttaagtaatttacttaaggatctgattacaaatgttcaatcttaataaagttaatacagtttatcttgcatgtggtataacagatttgcgaaaaagcattgatggactagtagttatcgtgcaaacgcagctaaagctggatccgtttgaaaaagccttgtttgttttttgtaataggcaaatgaatagaattaaaatcctccactttgatgaaggattctggctatattattttcgacttgaaaatagtaaattgaaatggccgatgactccagacgaagctcttaagattaacaaagaagaattgaaatggctacttatgggatatgaagttagaactaagtctaaatttaagccaattgaagtaagaaacagcttttaaagcaaatattgctataagcccttaattttgaacttttacaagtttcggaattaagggctttgtggtaatatatgcctatatttgttgtgaggtataaaaatggatattttagatttagagaatcagctcgatgaaaaaacaaaattattgatttctaaaatggaagaacaaattcaatcaaaagataaagaaattgataatttaaaaaaggaattagcttttcttaaaggacaacttcttaataaaaacagaaaaatttttggacaatctagtgagcaagttgattcaagacagatatctctttttaatgatgctgaaaaagacagtgatctaaaaatagaggaacctaccattgaagaaattacatataaaagaaagaaatcatcttctcattcagggaaaaaagataacttatccggtctagatagagtcataattgagcataaaattaatgattccgaagcagtttgcgataaatgcggaaataatttagttgtaataggcaaaaaatcaaaagagattttaaagtataagccagcagaactttacatagaggaacatatttcgtatacatatgcatgcaaaaattgcgaagcggatgcagataaagtcaatataatttcagcaaaaataccaaatacattcttatataaaagtatggcttcaaatgaattattagctcatgttgtgagcatgaaatatcaatatgcaatgccgttatatagaatggaatcatattttaagatgatggatgttaatctttcaagacagacattatctaattggataataagttgtgcaactgagcttaagcctgtttttaactatatgaaagaggagctcttaaaaagaaattatatacatgccgatgaaacatatctgaaggttattgaagaaaacggaaaagattctaactcaaaaagattcatgtggttatatcgctccggaggcattgaaaatccagtaattctatatgattatcaaaaaacaagatctggatcttgtgcagaagaatttcttgaaggattctcaggctatcttcaaacagatggatatgatggctataataaggttaaaaatataaaaagattatattgcatggctcatattcgaagaaaattctttgaaataatatcatcattaagccctgaagctttaaagcaatcacatgcattagaagggtttaattattgtgagcaactttatgaaattgaaaaagagctaagggaacaatacatggggagtgatgattattatactgatagacatataataaggctcaagaaatctgcccctatccttaaaaaatttcaagaatatgtagatagtgaaattgttgatgctcttcctaaaagtcctttaggtaaagctcttgcatatgcgcaaaagttattgccatatatgagaactttcttaacgaacggatgtcttgaaattgataataatgcagccgaaagagctataaagccatttgtaattggcagaaaaaattggatgttttccaagacttcaaaaggcgcatcgtcaagcgcacttctttatagtattattgaaacggctaaagccaatggcttagcaactgaaaagtatttagtatatttatttgaagtgttagcaagttcggaaattaaagaaagggacatactagaaaaatgtatgccatggtcggaaaacattccagatcaactgcgtgtcaagactaccaaataattaatttacatataaaaatatacctaacagagaatttaaacttttctgttgggtatattttatcacttaaattgcgctatcgctacgcgtcgattctttgacgcttacttaaaaccgcaattgttggtgtagatgattgtatgctaatcggatttatattccaatatggctggattaaaactacagtttcaactactgctattgtagctttacaaacatttatattccaatatggctggattaaaactattgatttaacggataaagatcatgcagcaaatacatttacattccaatatggagagattaaaaccagaattgcaaaaagctggtttagtttataaagatttatttacattccaatgtggatagattaaaactcattgttcctttgaaaatagataaaattgcactagaatttacgttccaatatgggtagattaaaacgcctatcgctgcataaacttgataattccatgcataatttacattccattatggatagattaaaactatattttgttcaatggcactatgatactcttctacatttacattccaatttggataaattaaaacttggatatatataagtttgtatgtgcgacagaataatttacattccattatggagagattaaaacattttaattttgtctgaacaactaaattataccactattttcattccaatttggatagattaaaacttttatgtgtttattaaatatagccaagagccttatatttacattccaatatgggtagattaaaactccatattctcttattgtgaaaccaccaacatctgaatttacattccattatgggaagattaaaacaatatcattcaatttcatgttatattctacgtttaaatttacattccaacatggatagattaaaactggattatttgagtattgttgtttagttcttactttatttacattccaatatggatagattaaaactcaactagctttaaacgtacattatcacctactttaatttacattccaatatggatagattaaaactgtcatctttgaagatttaaactcttcatatacgatatttacattccaatatggatagattaaaacagtcactacatttacaagccatgtccatatattaccatttacattccaatatggatagattaaaacgctttagccttgtcagtttcatcgatagattcagtaatttacattccaatatggatagattaaaaccctactaataaagccgtttattagtccttcttttacatttacattccaatatggatagattaaaacatgagcatcctcttgatttttcaacttaatagcagtatttacattccaatatggatagattaaaacccacaatctcatccaaaatcttttggcttgaccatcatttacattccaatatggatagattaaaaccatctttccatgttgaatttgattcgaattatttttaatttacattccaatatggatagattaaaacaaccaactaatactaacggtgctggtggagaaacaaatttacattccaatatggatagattaaaacacgatttacgtcaatccattggtggagcagttaatgcatttacattccaatatggatagattaaaacaccaggatactaaaccagttaccaataaaacaattacatttacattccaatatggatagattaaaacacaaatcaacaccagtaaaatgtaacatatctaaatctatttacattccaatatggatagattaaaacacacacctatcattttaacgcctattaacaggcattacaataatagtttttgtctatgtctttttactatatatattagtcttctaataatattataaattaaatattttgtagctacaaacccttaatcttcagctatttgtcgtacccctagcaatttcccactacagcacatcgacaatacatttgaaatagttaaaaaaagttggataatgcatcattctttttgccccaaaattctttatcaagccacttttcgctcctacttttaaaaattatcattgaatccaaatcttttctgataagtttatttaattctgcatttagttttactatttgtgcttctgttatttccccctcaaaaacagaattttgaatatgcgttaaatattttttacaagttttaaatacctttcctaatactttttgtccgttttcatctccgcttatgtcataaactaaaacaacatacattaattaattccctcctaccaccatattttaaaaccttcatactctttttcccccattaaatgttttattaatttatagcactcaagtctaattagttgtttatatgaaacatcttttgataattctttatgatggattgttgtttttagcatttcatcaaatttcatggatattgttctagatgcatcttttgttagatggagataatttaaattttttgtaaagcaacttggtgttatttgatttttgtttagcaatgaaaaaatcaatctgtctcctaaaagtggtttgaatacttctgccaaatctaagcttaatgaaaatctccttactcctggctcatgtaaatagctgatagttgggttaagttgtgtccgatatatttctcccagaactcttgtatacactaatccattaacaaaagaaatcatagtattaatcatattgtctggaggatttttcactctcttttcaaaatctattttttgattaacaatagtgttccaagctgagtaatattgttttcttatgttaccttccactcccattaattcattaatgctctctgtttttaatatcttctttctaagagattctatttctatcattaccttttctacatctttacctctaccgttataatatcttagatttctataaatatttgctgcagctgcatctataaatttccttgctatacaaatccttttttgttcatcttcatagtgattaacttgttttactagcagatttcctgcaagtaactcttctcttggataaaaactacctgtataaaagctgtaataattaaaaaaatgaattggtattttatatttagatgcaaaagttataaactttgtattaaatgtcatctcagacattacatatatatcttcaacctgttctattggaatatctctggtttcattttcactattagtaaactgtagtgtattatcttttctgtgtaactctccattactatacatataatagctccgtttcaaagcaattcatccctctccttaaatatagcataattcaaaatatgcacatttcttacaaatttgcttcttttcaagtagtggtggtaaaggcttattaacaatttcttttaaatccaccaacatattctctatattactttcatcttcatctgttaattcaatattaatgctttgttttaaaagaggataatcaaccttcccattaatattttcaacacctttttgctttagataatataaataatatttaatctgcattattccagcttcctcaatttttttactctttttaacttcatgcaatgtgcccttacttcttatataatcaatattaataacatcatctatattaatatgtttgtcttctctctcgtaggtattttcatcaataatcttacctatttgtacattttcattgtctgcttccatttgtatctgattgtaaaagtaccatacttttcttttacaaaccatgtaataataaatcattgttccactaattggcttgtccatagcgctccctcttttttataaaaaattatcaaagttttcttctatacctgttacttcttcacttgttagtcgtataaatcccaattcattgtatttacaatctacaacattaataaattcatttttacttaattgaatcttcttaataattgcactttttccattaaaataaatatcatatctaccaactggcactgtgtattttttgatttcttcttttaaatttattttttctaatttgactttatccaactctgctttatctaacttttttgttacagtttttaataattttctagaattctcatctatctcatgttgatgctcttcataaacttgtttaggtattacatcataagatataatatttcttaaatttatatcttctttatctatttcataaggttctatttctcctatccattttgaaaacttactatacttaaattcataatcacttccttttaaattttctgttgttaaatatttatttataatatttaccttatctttttctgttaatactccatttacatctttcattgcatcctttgataatgagtatattttactatcaataaatcctttatcaccatttgttaatagattgttatcaatacttaaaaacacaaagcaattaggttcatctacagatttctcaccttttctgttacatcttccgagtcgttgaaataatccgcttatatctgaaagctctgtaaataaataatcaaaatcaatatctaaacttgcctctacaatttgtgtggaaatccaaatccctgttccaatatttttagtttttccaaacttcaatattttgctttctttatctgctctttcacattttataaatttactatgtagtatatttaaattggaaactttcctcttgagaagctctttatatatttgttgcgctttttttacagtattacaaactacaagtattttattacttattcccttgattttgttttcttcaaatttactatatataaggtctgcatctatttgactatcataaatcttaacattgtgccttttcatatcatttatgaatgttttttcctcaaactcaattggattttctccatccttaaatttatcttttataaatggtgctaaagttgctgttaaaattgccaccttaccaccaaatttatttattgttttgattccataaattaaatatgcaagtaaatctgctccatacatttgaatctcatcaataactattttggaataagatagtgtcgcaagtttaagttcataaccttggtatttaaaaacaaaatcaaataattgatctaaagtagaaatattaagaggcatcgaaagttttctactctgattataataatccataatatccatttcttcatttttgttactgctatagtaacttagtgaatctgaatgaagtagcgccaatttagttttaatatcattttcctctagaatatcttctttaattctttcatatattgaatttatagctgtttttaatggtaatataaaaaaacctttattatttcctatccaatgtagccctgcctcagtctttcccataccagtttgagcaacgacaacaatattcttgtttgtattttccctacaaaactgttgaagctcattccaattcgcgtcatcattctccactttccatttttttaataaattatcaagaccctgatttaaaaaatcattttcgtattcaactgggatatctccgcttgcactataatcacacttatgaagaaatccttttataagaattgcatcataatttttagttattttcttcaaattagtggttgtacttcttttgattgtatttactttaaaatcacttaacagactttttattaattctttacattgttgattttctattgttccaagattatcgcagtagttatgatgatttaaaacagcaaatccaaccttataataatcttctatattttcaaattcatttttatctataaaatacagagataacacgttatgtgctacctctgcattttcatcaaactttgtattgctaactattcttttttgaaattctctattaaccttaccataatcatgatattcacaagcaattttggtaagttcatatatatattgactttttacataatttaatttttgtaatatatcgagatttttcaataattcatctgtatgctctcttattgttttatcaggctttgctttataaagagataaatccataatctcacctctaattaaaattaactatataagtcttatctttacttatatcaaaataaagattttcatatccttcttctgctgaatattctgatgcatatataactttctttttttcaaagattcttttattatcttctatgatatatttcttatttagataatattttgttccatttgctgatattttatctcctagtttcaaatatactttttcgtactttataagatcataatcgatataagcagaatagtcactaattacttcatcatcctcaattccatctacaacatcaacaaaacaaacgtccttaacatccacaaagtcttcacttctaccaattgcttttaagttatatatattgtctttaatatcattaagtgtctctttatcactttttacatgaattactagttctacattatttaagacctcatagtattttaaagaggttgtaatacttgcaaattttgaataaggaatttcatattctttatccttataatctttgaacctctgattaattgttttctctaaattctttagctctttttctcttttagaaatcaatttaaattcttccgaattcgcttcacatcttttcttcttatctgttaatgtcttttttcgattttttataatcttgaatatcttatctattctattctttttaaattctgtaattttatctgataaatctttaagctccctatattcttctagtaatttttcatttataacctctattgtagttccatttctaaaatcatttcctgtggctgctttagccttagctactttatcgaatgctgttgataataaattttgatttttcatttttactaaaattcctctatcattcatggttgaatttaaaaaacaataatccgtatatggttctttattcatagattcatatttaccttggatacttatatccattgggtgatactctgtataattacaggcactgtgcaaagctccaattattgttgaaaatggtggaagtggatatgtcatcttatttaaaactgtttcttcttttttataatttgcactactttgggttaatataatcctcaaaacttccatgacttataccccataatatgtgttaacttgtttccttaaatcctcaaaaaatttagcaacactaattggtgttaattcatttttaatttcaacttcatttttaaaattaccgccctcaagcaacgcaacattgcagccatttttaattctatctttcaaatcttctgtaattaataatttatcttctttaacctttactacgttctcaaaataatgagtttttctatcaaccagtccacctacaacaaataatggttcggcattatctaaatttcccttaactactaaattaagattttcaactgcatctaatatagaaataactctatcggctttttctttgctatctgcttctggtgtttcaaagttctcatctttccctatcatatctaaatccacagtaatactatatattttcatagttttatcaaactcatattggtatggcataaggccactttttcctgcatccgtctgtatatttaaattattattttttgcaaaatttgaggcaaggtacaaattattatggaatcttgtttcatttacaaaatcatcacaagcaattgcatcggtcaaataaaaagaactatttcttttaaatgtagttccagttgtattcatatatcccccctctaacgccctacggtactgtcaaagttttttatctaactaaggcagcaaccctttaatttttcttattttttatataaataacttgccacccccaaaaagttaagatattttatacttgcaaaacaaaaacactgaactaaaaaaggaggcaagctattaccatgattaataagtttcttcttgaaactgtaatttatcttattgaaattataaagtatctcatgactttgctggttggcaaaaacttgcttaaaagcatttcggacgaacctgttaagaaagaataccgaaagcttcaagtagatgatcaaccaatctttgatgttcccgaaaaacttaactataagcttctaatagctgaatatgagtttaagcacggcaaagaatttgctcctgtgaaacctcgcaaaaacaaagcgttagctcctaaggatgttatctgtcctaagtgtggtgctccacatacctatctttacgataataacggaggccgaggacaatatctttgcaaagtctgtgataccacattcaatcctaaaaattactatcagaaatccatagtgttaagatgtcctcactgcagtaaaacacttgaaagaatcaaggcgcgtaaggatttctacgtttataagtgtaagaatgataattgctctttttaccaaaataatcttaaatcaatgacaaaatctgaaaaacaagattttaagaagaatcctggtaagttcaaagttagatacatatttagagatttcacttttgactttaagccactttctaaagaaagtccggtaaaatcaaaggtttctcttccaaacattatgatttcttcttacaccttaggacttattctaacttactacgttaactatggtttatcttccagaaagacagctgcattgcttaaagatattcatgatattaaaatatctcatcaagcaattttaaactatgttaatgccgtttcaattgtagttaagccatttatagataactacgattataaactttctgactctttctgcggcgatgaaacctacataaaagttaacggtaagtggaactatattttcttcttttttgatgctgttaaaaagattattctatcttacagagtatcaccacatagagataccgaaacggctgtaaaagccatcgatgatgttctaagtaagttaaaagaaatacctgaagatcttaatcttataactgatggtaaccctatatatcttcttgcacagcacttctttgcaagccatagtataaaattcgatgttactcaagttataggcttaaccaataaagatgaaatttcaaaagaatataggccattgaagcaaattattgaacgtcttaaccgaacctttaaaggcaattatagagctactactggcttcggaagtcctaacgggtcggttgcatttgtaactatgtttgttgcatactttaactttttaagaccacattctgcccttgaaggcaaaactcctgtaatccttgaagagttagagtcaatgtccaacatgcctactagatggtgcaaattcattgaattatctcaagactttgtcctcaataactgtacaataactgcctaatgatctaaagcagttggtgaaacgcacccttgacacgcccacaaagataaatggtaaaatatctcaataggcgggtctattagtcatgttcaaaattatcattcacccgtccttaactgcctaagaccatttatctttaggtgtgtcaagggcaactagcaaacataatttaacattaaatggtagttggattgatttttcatatattttttacactacccgccctacaatttgtggcattaagatcagcagcaaccaatttttgtgtagcaccatctactgatgtttgcaagtcgtcatacataccactttgcaccattatagcatttttaagactttccctacttcttgtcgcataagtcttaccattcctaaatatcttttgaacacttgatatatttcctaggccttctccatagtttgatgtcatatttgcaacaattgtaagtgttaacgcttttttactcatttgcttttcctccattatctttattagactctttatttagtgcatttataaatgtatatgctatgtttttattttcatcaaaattgccaaataaatcatatgcaaagtcaaatacaacccctgaataagacgataactgtaataatacttggcaaaacctatcataatctttaaaagttattgcactaattaacttctgtttataactatctactttattttctggaatttctttcattacccttttagcacttgcataagcagacttcatttgcttgtccatcttatctcccccataaattaatgtattaatttctataagtgtcttaatattgtatgaataattcggatacttatattttgcagtatcctgttttggttttaataacatctctattaaagcatcaatttttatattatttaaaatactgtcacttacttctttctcaagatatctattgtagttttcatttactctatattttattttaatagctttataatttttaatcttagaaaatattctgatagcatcttttctaatgtacaatgtctcaaaataatccttatctctatttttagtaattacttcaacatcaaaatctataaaatcagcagagtttttaagttcagaaaataatgtacttctaggattatcgctattactaattagattatttgtattaaaaagttgttttatagaataattattatttataaaaaatgactcgtaagactttgaaaatgcaaatggaataaaatcaaactccttttcatcctcaaagttatatgtcttaaaatcccaattataagaaatcgatttactttttttccctgtatctatattataattttgtaatctacaaatacttccaacatcttgaaatagactatttatattagcaaaattagcatataaacttctgccagacctatatgtttcttttattaatagcaatctattttccttaatttgatctattattatctctttattttcaagtgaaaattttatatctttaaaaactttcttcataatagcattggattttaatttaagatttactaattttatttgttcatcagtaagttcatcatcacttaatattttttctatatccctatgatgcatatactcttgaaagtaatactcaacaaatagcaaatatctttcctctgtaatcgactccttgttatacaacagtacatcatcttcaatttgatatagatcagattctgctgcataccccttatctacaagataattgaaatattttataagccccactatactcgcactatatctccaatcatacgtttccattttagtgtcgaaattttcattttctattgtacctttcataaattctcctttctcattacttcaaacataccaaaaccacttgatttacgacttcctattccatttgaatataaataatttaacaatgctatattcccagtcaatttaaacgcacctatggttacctctataaattgtgaatgatgcttaacaacagtttttttacaatctacaggtatcatagaaaagccttctaaaatgaaagttggtaaagtattagagctggctatttgtacttctaatattttattaagtacttcattaaaaccttctttttcatgagaataatatatatctctattcatttccttattatgttcccgtacacacaaaggagatctaaatataacctcaattgtatttgtagtaattatatattctttttctattaaaatattttttacaatcattacattcccatatgccaatgggtatgatttgtttttttgcatcattaatgcattaaaaaatactatccctgttcccatatcatttgtgctaaacgaaatatagatttttttccttggtactagtataaactcttttgtaaacgtactattcggtatcactaccgcaaatgtaaaaggcttcactttccccaattcataataattactaaaatatttaccatcctcatataaagtcaaactatgtttaaatagactaattacagctggacgataatccaaaggtaaatgttcattttttaattccaattctattttaaatctcattatttctcctttctaagcaaaacgtctaaaattaatactataaatatataattcccatgcattatgtatcttgctattcatataaatgtttctttaatttgtaatagctaattttatctagtctcaactatgtaaatccaaattactcatatatccactatatatttcattaaataaatctattgctccgttgagtattttatatgctatttttctttttatataaaatcatccatattactaataaactattatattattttttctatttagtaattttttctacatttaagttccaattccttctaattatctaattttttttaaaaatagcataaataaacagtataattataattaaaacttttaggcccaattttcaaaatatatataattactttcctctactatgatgaattttacaactataactattaccattataaattcgtctaccttcctttataataatttttcttctcaaaattactttcatatatacgttatataccttttgaccatatatactatatgtagaggttgatttaacattaaacacaatatatgtaaaataattcattaaatttatagatcttatgtatgaaggaggtttatatggattttaattatatcgaaactttagttactaggtgtaaagataatgatgaaggagcaaaggaaaaattagctgaagaatttagaccattaatttataatatctcaaagaaaactttcattgatggatataactcatatgatattattcaggaatgctatcaatcactttttaaatctatttctatgtacaacttagacaagcatagatttgttgcttatgctaccaatgccattaaaaataatataaatgatttgattaagagaattaaaactagaagctctactgaaggtaataaagctctaagtttacatgataattttgaaaaggacatcccatcacaagaaatctctcctgagacttcattatgtgaaatgtgtgattatgaagacttaagactagctctaaaaaatttaactaaagatgagaaagaatttatagattttgtattctttaaaaattatacagttctggattatgcccatataaaaaatatgtgctattctactgctattgtaagaaagaaaaacattctaagaaaaatccacaataatatttcattttattattaaagctaaacgtctaacagctccaaggttaatttttttatacttggagctgttattattacaatgtgatttatattatattccaatatttttaaatattaaatatacactttattcaaaactaaaattatttataatctcagtagtttgctccacatagctatcaaccacttcatcaattccatcacaaatatatctaaggctacagccctgacatttatttagtatcccattctctaacaaagaacattttaattcatcctgaaaagtggaatttctaattgctaaagctatttgctttttatcaaatacctctccttcttctgaattaagtttaatttcattcttaaccatatcacaacacactccataatttatttgcagcttcataaaaattatgcgctgctattatggatatatgttctgtggtatgacataacattaaaatatagatatatattttgtgctatgacgcaacattaaaattataattaaatttgtatttctaatctcccagctcgcattttacaagcaaattcttaagtagagaacccaaaagtgatgctccaaattttacatttggtaaacagaactttctctatgagcgctttctatttagctataagtgaaaagttcttaattgcagcatagctgcttaatttataggtgcagaactttctctgtgagcatctatgatttggcgtgaatcagttaagcaggcatccaaatctgtgatttgataatgatcgcttactctgtggtatccagcgaacgcatgtgagtcggatttccttttatatctttaagttctaaagaataaacattcttatattgtaaaattcctaaattcttaagaatttatattctaaaatttttaagaactttagaatctctaataaatagccatatatcctttacgagattacataaaaatatttctaataattccaaaggaggttgtataatttatggccagaaaaaaagccccaaatgtacctaaaaatgattttgaatatgatgaaggtgaagtatgtggatttactagtgaagctcctattactggtgaatgcatatcttctttctcttttgatgatgattctgatgctgataagattcgagctgaacctaaatttgaatcaaataataaaactgcaactcaagaagctcctaacagtaatacaaaatcaactattacttttggtaatagtgacaatattaaagataatataattaactccatagaaataaaaagtactttaaattctactaaagaattatttgataataggaaaactccacttcctaatggtgctgttcctgccattgatggtgagactccaactattaagaggagctacacccttagaagttctaccataagaaaattaaatgaattaaaaagtattcatccagacattaacatatgtgtcagcacaatagttgatattgctatagattattaccataatcacattgtaaatgaatgcggtactcaatagaaaacaaattaatggcttaccagcttcaacaatacacttaataccataatatcaacaaagcttggaatgtgaatttttattttctccttaaattaagtttaatttattcatcttttttatctcacgatatataaaaattaaagatatcattgcagcaagaaaatcagctaatggaacagatacaaaaataccagtgattttaagaaatattggaatgattaaaattaatggtattagaaacaaaaatggtttcattattgataaaaataatgcaggcttaggttttccaatatactgaaaaaagcttgaagcaattacttgaacacctactaaaggactcataaatatcattgctcttaaaataggaactgtcagtactattaatccattatcagatgtaaaagcacccgctattttatttgtaaaaccaataattataattaaaaatgccaatgaaattataactgatgctaaaattgcaagctttaagctttgttttactctatcgaattttttagcaccataattaaatcctataataggctgaagggcttgtctaattccatacatagtaatggtaataaacccgaatacacgattatatataccaattgcagaaacatataagtcagatcctccataagcttttaatgaattatttaatactatggctagaattccataagccagttgagtcataaatgtagataatcctaaggaaatcgcttcctttaataattttatattaattgttaaatttttaacttttacccctaaaattttgctattcaaacagatgtatactagtaaaaatatgaaacatattatttgcgaaatgtctgtagcaatggcagctccttttataccatattgaagtcttgtaactaatatataatctaaaggaatattaattacaggtcctattatcatacttatcatagcaatattagcatgtccttctgattgtatgatgctattagcaacaatactaaaaacgaaaaaaacactgcaatataaagtaattctaaagaatgttacagcataaggtagtatattttccaaggaaccaaaaatatataacataggtcttatgaaaacgagtcctataaccataattaaaattcctaataaaacagaggatgttaatgcggtccccacagccttttctgctcttagtttatctcctgctccaagacttctagaagttatagaagcaattccaactcctatcatttgagaaagcgccagtattatttgctgaataggaaagactatagttaaagctgcaattcctaagctaccattaggctgattacctataaaaattgcatcaataatgttatataatacattagctaaaaatacacttatggcaggaatagaaaacttaaagagtaattttttgatactaccttccagaataaaattttcaagttcagtcatattattacctcctcttacttttctttattataacaatccgcgtaaaagattttttgacctatcttgctgttatcggaataaaaagatatgcatcaatatttttttgattaggtacaaaaccattgggataaaactcatatgcgtaattatcgcatgggacatacaattcatcattaagtaagctaaaccagtttctctgtatctgaatctgtatcttttcgattatatttgttaaggaatatactgcataatcattctccggtatatatttatgtactaattgagcatctttcctgtcaatctgactaaaatatcgactatcaattccagcgataaaatcgaactcataactcctcacttcttcatttttacaaaaatccaatccgtaaaccccatcaatttgattatatattttatccaattgcacttttttagcagtttgattaaaaatacgtgcaacatcatgttttttattatccccatgatacaataatcctgttatctcaaaagaatttttatgtattatttcatattctgttgctgttccatatgacatcaccctctcgatgtcttcctgtgtaattgaatatttatataaatttaaatattcaatcttattgtcacgataatcctttggtgtaataccaaaatatgccttaaacatacgggtaaaactttcctgagaactatatccacacattatagctatattcaatatactatctcttgtctctaataagctcatcgctgcaattgtaagcctacgcttcatttgataatccccaatattctctcccaacactgctttgaataatctagcatagtgaaatttagaaaaattaaactgcttcgcaagttgttctaatgaaactccctcaagcaagtgtttttctaaatattcaattgcatccaaaacataattctttgtattcataacatcacctcatagatttttcttaattacttgatctaagcttatatgacataaaacttaaagctaccaatgttggcttttctagatttgatggatataattaccctatcttagagaaaaaaaagtacctatgtttttcgcagaatagtactagaatatcatatcattattatactacaattttttattattttgcctatattttcctcaattatgatttactgttttaataatatacatgttaatcaaatttcaaaactgttttcattatcccaagccctcccccatcaaatgtaatgtaatcacaatacgtaacctacgtttattgaaaaaataaccattgctatcaatccaaaggctataataaatattacagatccatctattttttacaaaagtcttctctcttttttaattcaattcttatttcacctctaatcatttaacaaacacactctataattttattacgcgattaaaatttttctccactaatatttaagacgtattttcctatcttaaaccacataaaaatcgaacttttttaagccaatagccttcaaacccgcattattccagcatattcttcagaatattagaatatcagaatatatattctagtattctgaagaataaatatgttggagaatatatattctttaccatataagaatattgactaaatgttttgagcttgttttaaatatctctctaaattttacaaagccttatgaaaattcttgcgccctattgcttagtagcttagtacattcataaaaataaaaaaagaataccaaaagctcttattgctctaagtattccttttaataatatttacctattatataatatgcatttacaaatttgttaaaacttgagttcatatctttactagaaattataaatatattttcatagcttttcggaacaaaatatttatgatttcggtgatgcatacgcataagtatagattatagttgagttatctataatgctcatttcttctcactatttgttgtatccatcagctgcgtgaaactcaataatttattttatatctattatttatatatattccaattcacaattgcggctaaaattcttgtaatatttttagaattatgatgaagaattatttttgcaacgtatatataataatttcattaattattttaaaattgtttatgtacattcatatatccattaaaaggaggtggatatatatgcaggtaactgatttaattaatcttgtggctaacaatggctttgctatagctgtagcagcatatttgctaatacgcttagaaagacaaattgataacttatcctcatcaattaataggttaaatactataatatcagctaaacttggagtagctattaatactgatagttctaatgatgattctcataacgtagcttaaaaaaaggcaataaacattataaagtgccctccaaatattaaatatgagtgtatcatatgtctaatattttgggggcacttcattatccatattgcctttttcctacaatgcggtttctattccaacacgctttattctaaattatattttaatatagtatttttacattagttataactccatttgaagcgttatatcccttaccagttttaaataataaacttctaacttcctgaccttcatcctcatctatataataatgttcacacatttctaattcatatttatactcatctggttttcaatcatttgacactattcttaatttataaaatacgtaaactttctttctgaaaactctttataggcatctcgataaatttgaatttatctaattcttttatatcaatagattacatgtatattaatttctatttctgccataatacaattttaaaagtttaacaggcaccaatatcaaaattagccttggtgttggtattgaaatattaatctttatacacatctattttcctttgtattatttcgtctacttttaatttaaattcttcttttatttcaatttcaatgctcttgttcttttttaatttaagttcaattttatttggtaataaccagctatacccctgaaattcattccatttataaaaataaccactggagttatatattccattttctctaatttctaagcttcttattgatcttataatattgaaaattgaagtttccatccaaaataatgtatttaagatataatgaataactctaaattctccatattgtatatattcaccaatgtaaaaatataaaatcttacatcccacaattaataatatcacccaaaaaatagataaactcctcttcttttttaatttcatgatacagctcccatgatagcatgctttgtataagtgatctaatatgcaccatattccaagaatagttagtattatatcaaaaattgtcactatcgaaaacttgtccaccaaattcaccacacttattttattttcagccaaaattgtagctattgaataacttttatctcaatatataaatactccttttcaaattctgatttgtatatttcattatttataaacaactcgatagattgctatttattcttatcttcacagctcatatccaatttaaagtaacacctatctttttaactctgtagagagtatatatctgaaaattctatttgtattttttctatattggttttaaatagaattttatcttcttcttcttcatttttaatcaattctactggtaattctattataaattcactgccttgtccttcgacgcttgcaacacttatttttccaccatgcatttcaacaaaagatttaacaagatataatcctattccagttccctcacattttcttgaaagagtgttatccactttgccaaaacgttcaaatataaaattaagtttgtcctttggaataccttccccctcatcccttactttaacgataacacttgtttgtttgtctataaaatcaacatatatatttcccttagaatgactatatttaagagcatttgatattaaattaagcattatacgttccatcatatcatggtcaaatcccatgatcttttcctcaacgtttgtatcaaatataagtgttatatctttatcattgacataagatgccacagattgggtaatctcttcgataatatttacaatattaccatttcttttttttattctaataaatccagaatcagaatttaacttagttacatctaagaaattatttattattctaatcagtcttaaacaattttgtttcattgttttaaaatatgctttacatttttctatgttttccaaattataattgccaaaataaatatttacagtttgaactgctgaataaattacattaacaggtgtcttaagctcatgagacatattagtaaaaaagttcattataagattgttaaattcccttgactcattaagtaactttagatttttttctatatcttcttgtagagattcaactttcttttcagatgttatatctcttaaaaatgtcaaaactgatggtttccctttataagtaaaaaaagatgatgtattaatcaccggaatgaattcaccatcacaatttaatatgctctcctcacttgtaatctttacaagcttattatggctaatacttgaatatttctttttaatatctttgttaacttccgataaataatgattataaaagttctctccctttaaacctaataatttagttgcacttgcattagcatatataacttctccatttgtatgtacaataattgagtttaatgaattttcaaataacatatcataacaaattttattatttaataatagagattccatctcctttttttcattgcttaatgtattaagagtttcatctttctttttattattttcagcttcaatattaacataatatcctaagatccacgcaacaagaataaatacaccacacattattaaatctttttgaaaatatatactaactccattctctaaggaatcatataataaatctgctccaagtataataccacaagaaaaaattgctgttactatcccacatttagaaccatattgaataattgaatatattattaataacagaaataaatatttgcattcactttgatatgctttggataaatatataggtatagatataataaatgtaaaaataatattatctattaaccaagagtcctttaataaaattcttttttgtaagactataccagtaattattaaacacataatgaaatttattccaataaagagcgaagaaaaaattgatatatatatattaaattgagtattttcgcgtatatataaacttgaccaatactctggcaaattcatatgtattattatgctactaaatactataattgcaattttaataaaacacatcattgtttttaatttgtcattgtgtttatttgtataattatccatatgcatattcctttcaataaataattattaaaagtaaaaattgtcacttgaacttatgacaatttttacttttaacattgatattaatgcttcttaatatctcttaaacattttggttcttcaggttggtagaatccccaaccacatgctgacgcagaaactcttagtgccattctttcacaaatatttgatgtaagcttaagtaagaaattttctaaaatatttttcattaatttcatctcctctgcattctatatttatattaaagataatttggaatgactttcttattttttagtataactttcaaaattataactgatattatgaatataattaagcttggaatcccatatatgaatcttgttattggctgtaaaacagaaatatctgtatttatatttaagctatctagtaataacatactgacagtttcacttaaagaaagcatgaagtataataaaaaagttccttgtacattttttattaatggtatatccataataaacataacaaaaattatagttagcattatacaaatatctgtatgcactccaaaatatataggcaaacatcttataataaaacacgatatagctaatattaaacttaaaagtaggtatctaaacatatcaatagtttttctggaaaatatgtgtatgccccacattaaaataagtgattctggaataagtctaaaaaagaaatctacgcaagtaagtctaaacattacattcctctcttttctttaatattttatatatttaaacgttaaagtattttctatatttatcactattttaaattatttttacattttctcctttttgcattgtcatctcccacatgcttattttcatgtatattttaacaatcatgcttctactataaaatgattgttttgtttatcctatttttaaagttactttgcctttggtgtcacggatgttcccattccctcaattatatattttaaggcggagtcaactttgtttaaaaagttcattccatttttagtaagagtaatagtctgccataagactccaacactaatactttctattaattttatgtaatacaattctgaaaatttttcgttgagcatgaataagattattattataaataaaaaaataaatatagccaaaatggatttcctcttaaattgctttctagtttcaatatttttaataggcttcttaatactatctacaggtgcatttctaaaaactgttataaatgcaaatattataatagcaccgcttattactgctacagtaatactatttatagtgtaaaatatattattaattaaaattccagctaatgctgctgaaaatgttcctattatgacacatcggcttggtgaggatgcatgtacaccgcctgaatattttctaagaatgctggcactaatagaaaatattaaagcttcataaaacactccaaaaagcaacccagcaattatgacccataagatagcaaatagcatttgaaacaaatttattgctccatatacgattatctgttcttgttcttcattaacatttaaaaataattttgcattattaccaattttagttgctattttttcagttagagacattttcgctcatccctttatttttaataatgatttcatgattattatgcataataaaacaaacataataacaatgattaaaattctataaatttctttatgaaccccatagtatatacgcatattacttagaaaattaatatagataataatagatcagaaaaatcaaattgactttctatattaattactattttatctttttatagctttcagccatatcaactaaatttacatattttgtttctatatcttataataagcatatttttataataatgtaaatagaaatggaataaaacgtcaaaatattggaataaacagaaatttattggataaatatgtataaagcttatagatccaagcaaacgcccttttgttctttcgttattgtacaatttatcggttatcatcatcaattaacaaattaaataatataatataatatatatattgcaaaaataatccttcatcataattctagaaatattacaagaattttagctgtaattgtgaaatgtgcattgtgaattgcaacatatatatcagctaaacttggattagctattgatacagatagttctagggagtatcaataaaaatctttcgatactgcttctgtggctttattaataaaagcagcaattttacttggactttccttcataccactattgacccacttttctattacggctatagtaccatatgcggtaaatgtgtaccaattatcaaatagtttttgatcaatatatttttcttccttcttccatttctcaatatttaattcgtggctgatatagataatacgtttcaataattctttatccccgttctctgaaaataatactccacatatattgctatttgcttttatatacttgcaaatttcatatgatagtttttcataagtttcaaggttcaaagtacgttctgcaacctgtctgatttcttcatataactcaccttcaatatttgaaagaagttcaaactgattcgcataatgtgaataaaaagtattgcgattgatatctgcttttttgcatatatctgtcactgtaactttgctgataggacgctctttcataagttccagtaaactgttttttataacactctttgtatatctcacccggcggtctgctttttcgtatgccataataccgttgccaaaaccttataaaactttatagttcttgtttaattccctgttcaatgtgtccgattttgtaattctaaaagaatatactactttcattgaagtaatctaatctgcttttcaagttttataatgttgctagttttgacaaacttcctcccttctttatttaactcatgttttcttgatagtttacactgcaacctacgtaatcttttttctacacctacagatacacaccaatacttaccatcaaaactcactcttggattcgtatacttaacaccaattagtatttattcggctgttctaatcccccccactttttcaattaaaaccatattggctttgacttttagttttatattgtcattatagaatgatgttttagaccttcttctgatttttaaccttggtctatctgttagtcctttaaaaaatcttttgaaagcttcacaaccatccatagggtttctacttcaactattaacttattcatgtataagttaagttttcgtatataatccttataattcttaatcttcttcattttaagtattagctataatctcagtaataattccacatttactacatagattttctataattttaaatccaaaaaatatttttttgccttaatcttaaatgatgattgtgttgttcttatttatccgccataaataattcagtgaacgaacaacacttatctgatttgtaagatatcgaacgtaatgttatcgaactgcctgttgattaagtatcactgtgtacttataatatatttaacatctaacatatttgaacgttcaaataaattataattttaaatggaggtaatacaatgggaaatataactatagtacctgtatggattattcaagatattttagttctaatcatcgccgcattaatggttttctatataattgaaaacgaagaacgtccaaagattgtattaatgcaattcatatgttttgtctttttctacgccgcagtctttgaaaatgttgcggtatctatgggacttatgggaaataaaggtttttacgcctatgggcacagtatcctaatgatattcaatatcccattaactgttcctattatcgagtttcttatcgtttactcaactttacgtgttttgaagacgatcaatataccggcatggactaagcccttcattactggacttagtgctatgatttttgacttttcactggatccagtcgcagtaaaacagatttttcaaacttcggaaggaatcattggccggtggagttatttcccgatccctggtgaacctgtcatatatggggaacctgtcatgaattttacaggatggatctatatagccggatactggactgcatttattttaatcggtgaatggtggcataaaaagaaaggctatagtaaactaattggctacatatatccgtttttggcttccattctttctgtagtttgtttggtttcacctttatccaatttctttaattatatggcaccatttttcccaagaacttctaatatgcaatgggtaatgttgattgcacttactataatttcagtgggaattttagtgttaaccttaaccaagttatgggatcgtaaggtcattagttctatggattacaaaaacgattttcctatcatgtttacattcctgggttttccactggttaataccatattttgcattataggtggatacatgcaggtactatggcttgttgttctggcacaggtgttattattgctatgctggattggaattcatattttgagtaaaaaagttattctcaagaaataaagtgcccctacaagttagataaatattcgcacaatagagttttatattgtcttattctattgaggcattaattagaaaccaatgaaaatctcggatataatctataaacagggcaaaaaaaatcgggactgaaaaacacatttttcagtctcgattttttctcatttttcaccttagaaccactattcgtcatcaaaattaccgcctccacgtgtcacattactggaaacaattcaataatgtttttagcattcttgacatttttgataacatttttaaaaaacctcatttatttatagtacagttcacagtaacagttgtaagtgatatacatctactctatcgaatataacgctgccttttctgcatgaattaatgttgtatcaaataatggtgttttggtatctctttgttgaactaacaaacctatttctgtgcatcccaatattactccttgtgctcctttattagttaacttatctataatatttaaataaacctctttggaatgttcggatataatgcctacacataattcattgtaaataattttatttacagtttctatatcttctttatctggaatcaatactctaatcccatcttcaatcaacttggatttataaaaatcttgctccatagtatactttgtccctaataaagcgatttttgtaatattttctgcctttaatacttgtgctgttacttctgcaatatgtaatataggaatgctgatagcttcctgaactttgtcagccactttatgcatagtattagtacatataactataaagtccgcacctgctttttctaaagtaagagctgcttctgataaaatctgtgcacttacttcccactctccagttgattgacacttctctatttcatgaaagtcaagactgtataataagcatttagcagaatgtaatcctccaagtttctctttaataacattatttaaaacttgataatatgtgactgtgctttcccaactcattcctccaattaaaccaattgttttcatttttacttatcgccccaatctttaatatatattattaagctacttatattctaacaatataatactattgtagcataatatgcaatggttaatttatttaatttttgttatttgaatttgaaaccttatattaactcttcatcattcataaagttgtctatggaggtatttagttcggcatacataatatatttagctatcaagatactcaaaagtaattctaacccaaatgcaattaatgattacagcatcaactcatttaaatctggaatgcttatgcaattcatgaatcctaaaacaatactttatggcataacggtgacttcaatttttataatcccctactataaatcgagcataatattatgcttatttgctatattcctctcattagtaggatttatatcgatgtcctgctggactctttttggtgcattatttcaaaaaattcttagccgtcatagaaaattatttaatattgttatggcatctctcctggtatattgtgcattatcagttcccgattttaaacttctaattcatttatctgatgtctagacggggtacccctttgaattattaaaatgtgcattgaaaaatggtatagcttttatttcaggcgaagcatttttcccaaatggtggtcataaaaataccttacgcttgaactatacaaatattaattttgacttggttctcttctatactaaatttttatagtcagctagcttaccttcaaaattgataacttgaccattgtgatttttttcatccaaagctaaacctacaatccattctgcagcttcttcaggcatttttacaccttttcctgttgtatgattattcaaatcagttgaaacggcaccaggcatcactgcaaatatctgtaccggaagagcactctcatcaatgctaattccccaagactttgtcattatattaagtggtgcttttccagttagatatgcaaaagggttcatattaggaaatggcattggttcaattggaattgaaacattgactattttgccatggttctctataagaatgggtaataatcctttagacagctcaaatggaccaagaaaatctactgtataagtttctaaaagctcttcttttgtaaattcccagctagggcgtttaataagtggtccagatatgcctgcattattaaccaataaattaagctttttatattcctttgaaactcgctgtactgcctcttttatactttcactatctgaataatctatttttattaaatcaacaggaccatacttagcaagttcttttattgcattcttgccacggctttcatctcgagcaccaactaaaacgtgatatccttcttttaataattttttagaaatttcaaaacctattcctttgttggcaccagtaactaatgctgttttcatagtaagcatctcctttttttaacttgtgtttctttagtatagttctaatattaatttataatcgcttgatttggaagttcaaataggttagcatggtattaactaaaagtttatgcaaaaaggagattctttaaatgaatgaacaattgaatgcttttattcaggtagcagagtctggtagcttttccaaggctgctgaaaaactgtttgtttccccaacggctgtgatgaaacagattaattcccttgagaaggaagtgggtgtacctcttttcatccgcaccaaccatggtgttgaactgaccgatgcaggaaaatccttcaataaggatgcggaatttattttgcagtattttcaagaagcactactgcgtacacgtaatacaacgcatgtagataagcatattattcgggttgggacctctatacttaatccctgtaaggttttactggatctttggaatgaaatcagtaatcaacatccccagttcgaaataaaaatcgtcccttttgaggatgatgcatatacattaccaaacacttatcgtaacattggcaaacattttgatttcatagtaggaccattcctcacagaaaattggaatgattattcccatacacttaagctaggaacttaccgtttttgctttgctgtatctcgcaaacatcggcttgcttctaagaaaaaactttctataacagatttgtatggagaaaagttggttgtaataaaaggtggaactagtgcatccattgatgaaatcagtgaatttttcataaagaaccatcctgaaattcatattaaaagtgttcctcgtctttatgatattgatgtattcaatcgctgcgggcaaaataaccttatcctcttaacattagatgcctggtcagatattcatccctccttagtgaccatacctagcgatttggatttcactataccttatggcttgttctatcccttaaatccatccaaggatgtgattgagtttttagaaataataaaagaaatgcaaactaatcattaattttaaacaatactgccttctaatgtattgctgatagttccgatattttagtgtcttaaatcatttttttttagcatagtaatctttcatatttttacaatagaaaaaagccttaatcactgtttcactggtaattaaggcttgttgtccaatcacataatcttttaaattttgtggtgttagttctacttgaattattagcgagatagaaaaatcattattacaaattatcaagggatttgtataagttccaccattactacataccatcttatcaacatattcagcaataacatcggcgaatcaatgtaattcttatactttttttcttaaagttctttctctttttctacgactatgacatcccctcacccatcttcatatttatttctgtattccccatattcattgtctagtttctgtaatatatcttgaatagtttcttgaagctccttgaaaataaaaaaactcttcccatatttctaaggtaagagttttcaatagaataatatatacattttctatcatttcaaagaaaatcccgttatttatgatacggttcttcatatcagtggtaagtaaggttttttcattttatttcagtgtatatattctatatatcactcaaaacaaaaattcattttcccaatcaaagtcaccagactcttcataagatgatggccaatgactgcaccacttaggaacattaggtttttctactctatcgatacttggagtataaggctttatatctaaaatactactattgttcattgcatcaatataagtaatatagattctaccattatcataatcaatatgtgttatttcaattatagataatgctattggatttggcctttcaggtgacctagttgaaaatactcctaacttttcaggcgcttttttatagggcttctttacttcaataattcctctactttcattattatcgcacttatcaaaccaccaaagtacatcaatgtgagaaaaatcttctaatccttgaagtccttttacatactctttattaatttgaagaaacatttcttctccttccacattaattataccaatttcttttaattgcatactatttacctccttgatatttatcttatataaaaataatagaccctcacataatgtgagagtcaataaattttattttaatggaatctgtatttccgtaagatattcttctgaattcttagtatcacctacacctatatgacatatctgtctagaaggactttctgtcatttgttcattatgactttcaagataatatgcaagcatttcatatgcctttgctaaattttcatatggcccatacaccattgcatatgccattttctctacttcctctacttctctatatataaacttgcctttgttttctcctaatttatctacaataatcccaacttcaacatctacatttttatctttatgttcaatatcatgatacatagcgacattattgtacatatcctgctttatagaaatattttctttcttaataaaatcacataacctattccataaaactccctcatgaaaataagttggaattatatctctagtggataatatcaatatactgtctactttcttaaaacttatattacaatgtattttaaaattcttttttatgatttcatttattgcattatttattttttctaccctctgtttttcaatttctatctctttattaatttgcatcttctttttttgtaattcatccactatatttaattctttatcacctaatataatatcttttatttctgcagttgaaaattttatatctcttaataagattattttttgaagcaatgatatctgatcagcagaatacagcctataccctgtaaacaaatcaacatctgcaggttttaatattccaatttcatcataatatcttaacattctaatagaaacctgagtcaattttgaaaactctccaattttaaacacaataccctcccactttaattatttgccaatatacattataattgtaacatattttgtaaatatactattacttatgatacggtattttcaggcaaaaaaatcaacactaagcaagtcgtatcaattcctaagactaaaaacctcatttatttatgataaggttcacccttaattattctaaaccttaatcagtattctttgtacttttatctattcatataaacttcctattatagacattataagaatacaatcctattattatctataagtctatataaccccttataatctttttttcatacaaggaacaacactacgaaatatatctgctagatgtaaactgtacaaattatcatcatgtataaaagcgaatcttcattccaaaaagagccagtaaatcttccatcaatattgatattccattttcttaaagaaatctaccttaggttcaagaaatttaaacttatggttatcatcatcttcaaaataagaagtaataggttcaaatattttatcccaattccatagttcatcatctatatttagataatctttaaacatttcacatccttctggtgctatagggtgtattagtactgctataactttacaagcgtaaaaacaatctgctattacgtttctttttaattcctcatttttaatattactagcccaatgtttatttacttcccttatataatcgtcaagaacatatgctattctatgaaaatcttgattatacatatgtctttcatattctaatactgctttttctgttaattctttaatttttttgcttacctcttctttaggaatatcttcattaagactttgtaaagtataaaaacatgagcgaataagcctattaaatacatttgttaaaaggtttccttcttttaatactgggtccgctcctactttttcttcttccttcatgtaaacttgtggcttaaaaccaacgctttttgaagataatccaagactcataaagtgcatgcgtaattgatccttagtataaaattttaataattcatctgccattggtggcttaatatctgaactgctgcttgcttttttatccataaataaaatgtgcttattagaaacaatgtgtggcaagtttagcttagtaacatctacattttcacctttagctacctttaacccaatgaacatagccatttcagcaattgaataaaaatatatattatcttcccctataaattgatataccattgaatcatcattatcccaccaattacgccattcttcaggattcttacctcttgactccaaatatgcttttgtaaaagaaattggagcccataaagattctggccacacccagaaggttaaattttttaagtcttctttatctggcacttttactccccactctatatttcctgataatctaaaaggaaccaaggtcttaccactagtatagttaatatttaaattatccaatatttcttttgctttatctctatcctctagtgtttggaaaataaatgctagtgaagattttttctcttcatctatggtttcatgacttggaaatttagcttctagctcatttacatcattaatatattttcttgggacatatattagtggtttcttcaaaaattcatctatagtgttaatttcatactttcgtctattagtattcttctttaaaaactcattaagttccttcattatatccatggattcatctaaggtaaaataccaattatctacactttttaatattggtttatttcctgataaagtgctaataggattaattaattcagatgccatatattgatgccctaatgaacattcttctgcataggctttatcagagttacatccagctattggacattttcctattacttgtcttccattaagaaagattttcttatcttcatcataaaattgcaatgctgacatcttctttatataaccatttttaaataaagtattaaatatttcttctgaaacttcattatgaaattctcctgtccttccaagggctgaagctccaaaaatatttaggctgatattgtaatcttctaatgttttcttttgactcaaatgatttgccttaacatagtcctccatagtattttcgtatccattttcctttagctttctgtagctttcaaggataggtgaaccataacaatctgtaccagatacaaaaataacattttctttccctattctgtctcttaaaaatcttgcaaatatatctgcatgaatgaacattcctccaacatggccaaaatgaagattcttatttccataaggcattccagctgttactatagccttctttggaaatgttggtctttcgtttttttctattcttttacttatcataaacgtaagcgtcaaagaatcgacgcgtagcgatagcgcaatttaagtgataaaatatacccaacagaaaagtttaaattctctgttaggtatatttttatatgtaaattaattatttggtagtcttgacacgcagttgatctggaatgttttccgaccatggcatacatttttctagtatgtccctttctttaatttccgaacttgctaacacttcaaataaatatactaaatacttttcagttgctaagccattggctttagccgtttcaataatactataaagaagtgcgcttgacgatgcgccttttgaagtcttggaaaacatccaattttttctgccaattacaaatggctttatagctctttcggctgcattattatcaatttcaagacatccgttcgttaagaaagttctcatatatggcaataacttttgcgcatatgcaagagctttacctaaaggacttttaggaagagcatcaacaatttcactatctacatattcttgaaattttttaaggataggggcagatttcttgagccttattatatgtctatcagtataataatcatcactccccatgtattgttcccttagctctttttcaatttcataaagttgctcacaataattaaacccttctaatgcatgtgattgctttaaagcttcagggcttaatgatgatattatttcaaagaattttcttcgaatatgagccatgcaatataatctttttatatttttaaccttattatagccatcatatccatctgtttgaagatagcctgagaatccttcaagaaattcttctgcacaagatccagatcttgttttttgataatcatatagaattactggattttcaatgcctccggagcgatataaccacatgaatctttttgagttagaatcttttccgttttcttcaataaccttcagatatgtttcatcggcatgtatataatttctttttaagagctcctctttcatatagttaaaaacaggcttaagctcagttgcacaacttattatccaattagataatgtctgtcttgaaagattaacatccatcatcttaaaatatgattccattctatataacggcattgcatattgatatttcatgctcacaacatgagctaataattcatttgaagccatacttttatataagaatgtatttggtatttttgctgaaattatattgactttatctgcatccgcttcgcaatttttgcatgcatatgtatacgaaatatgttcctctatgtaaagttctgctggcttatactttaaaatctcttttgattttttgcctattacaactaaattatttccgcatttatcgcaaactgcttcggaatcattaattttatgctcaattatgactctatctagaccggataagttatcttttttccctgaatgagaagatgatttctttcttttatatgtaatttcttcaatggtaggttcctctatttttagatcactgtctttttcagcatcattaaaaagagatatctgtcttgaatcaacttgctcactagattgtccaaaaatttttctgtttttattaagaagttgtcctttaagaaaagctaattccttttttaaattatcaatttctttatcttttgattgaatttgttcttccattttagaaatcaataattttgttttttcatcgagctgattctctaaatctaaaatatccatttttatacctcacaacaaatataggcatatattaccacaaagcccttaattccgaaacttgtaaaagttcaaaattaagggcttatagcaatatttgctttaaaagctgtttcttacttcaattggcttaaatttagacttagttctaacttcatatcccataagtagccatttcaattcttctttgttaatcttaagagcttcgtctggagtcatcggccatttcaatttactattttcaagtcgaaaataatatagccagaatccttcatcaaagtggaggattttaattctattcatttgcctattacaaaaaacaaacaaggctttttcaaacggatccagctttagctgcgtttgcacgataactactagtccatcaatgctttttcgcaaatctgttataccacatgcaagataaactgtattaactttattaagattgaacatttgtaatcagatccttaagtaaattacttaaaatagctatttcattagccggtacatgtactttagctactcctatttctattattatattaggtctatcagcttgaactacagtaatctcagttcttactcttttttctttcatagaaattgcatgaaactgtaaattattattttcattattaagcttctttttatagtaatagaattgacttttagtaatgtgatttgaattgcagaaatttcctaacgttccttcgtaagaagaaaagccagcaactatttctctccaatttatattttcattattattcatataaataaacctccattgttaaaatctatgctaattttaacaatggaggattgcattttctatccgttaatttttggtactgtataagtgtaagtgtaaaaccagatatatatggttagcatttgcacttattttatttataattgagggagtaattggtctgacgtcgttaattttggattaataacatccgtcgtaaaaactgtcaaccatcccttattataaatattcgattaagcaggttgaaaccctagaggctttcgtgtaactaaccaaaatgaattgtaataagtgcagatggagacaattacaaaaataaatttggaggttacttatgataagtgttggaattgatgtgtcaaaagaaaaaagtacagtgtgtattttaaaaccatacggagagatcgttagatctccatatgagattactcatacagaaagtcaaatgtcagaattagtatcaatgataaaatgtcttgatgatgaagtaagagttgtaatggaagctacgggaagttatcacctaccagtgcttagttttcttgaagaatatggaatttttgtagctgttattaatccgttagtgatgaaaaaatatgcaagtataattctcagaaaaggaaaaacggataaactggattctataaaaattgctaattatggtttggataactggtttcatttgattaactataaatctagtgatgaagtttacgtgcagttacgtcttcttggaagacagtacgctcactatataaaactccgaatagaaagcaaactatctttaactacaatgcttgattatacaatgccaggaattaagactatgctgaaaaaccgctcagataaaccagaaaaagacaagttgaatgattttgttgaagaatactggcattatgataacattacgaaaaaaactgagaaacagtttattaactgttataaaaattgggcaaaaaagaagggatatcaacaaagcgaagcgaaagccataaagatatatgacttagctcagcaaggaatccctaccttatcttccgatactccatcgaccaaaatgttagtattagaagcggttcgagttcttcgcgaaatagacaaaactcttgcattgattttatcacaaatgcaggaattagcaaagtcgttaaaggagtatatagttgttcgtgaaatgggcggagtaggtgacattatagcacccagacttatagctgagataggagatattagaagatttcatagtggaaaagctttgatagcgtatgctggcattgatgcgccaccgtatcaatcagggcagtttacgggaacccgaaggcgaatatctaagcgaggttcttcaacactaagaaaaactggatttgaaataatgaaatgtttaaaaagtattaagcccgagaacaatgctgtctatttatttatgttaaagaaggaagcagaaggaaaagcttcaaaagtggctaaaatagctggattaaataagtttttaagaatatattatgcaagagtaagcgaagtatataaataatatataacttagaaaattgaggcttggaccagaaaaaaacatctggtctaatttgcatgcaataaaataaaaaacaatcaaaaaatctgctataaaagcattgacttttattagcaggtttttacgcttactcataaacttctcactccttaagtttctaaatttcatacttgagataatcgaaaaataaaatatccatgatattttaacccgcattcagcacatgtattaatggaaaatattgtttctaaacataaaagttaaagaatgatattattattttatccaatattgaaagggtgttgaaattggatattaatgatatgcagatattttccgaagggcacctgcctatcgtgtcgggtgtttatgatcaattaaaaattggtaagaaaatagatgaggtagtaagctgggataaagaaaaatgtaaattgtcgccaggtgaagcagtaaaagctttaattcttaatattttaagtggttatgatccattgtacatgatatcagaattttataaagataaagatgtagaaaaactcgtaggcgaaagcattaattacactgaaattaacgaatttgccataggaagaaacttagacaaaatctatgattcagatgctaaaaaagtatattcgcatgtagtcttaacagcattaaaactagaaaacatagacgttaaagctatccactgggatacaacatctaaaagtttttcaggtgattacgaacgcgtaattccagaagtacaggatgataaaaaatatccaattaatattacatttgggcatagcaaagattacagaagagatttaaaacaaatgaagtttggagttggaactaccaaagataaacttccattattctgtgatgtgttaagcggaaatgaagatgataaaaagtggaatggcaatgtaattaaaagaattgaggaagaactttcaagtgttgatttatctaatattcttcacgttgccgatagtgcattagttaccaccgataatcttaaagaaattaatgatgagacatacaagtttatctcaagattaccgggtactttcagtctcgaagcgaagcttataaaaaaagctataaggacccctgaaaagtgggaagacttatctactttaggtaagaataaaaaaagagcaagcaaatatagaatacaaagttttaaggatgttattggtgaaaagaaatatcgttttgttgtatgtcattcatctaacctggctgaacaaaatatgaaaactttggaacgcaatatagaaaaagaaaagagtgaaacaaagaaagcatttgataaagctatttcaagagatggttatttctgcgaggcggatgcacagaaagccattcttaaatttgaagataaactaaaactcaagtaccataccctaaaatacacaatgcaggagaatgaacaaataaagaagcgatctggagtaaaaggacgaagaaaaaaagatgaaattccagaaacagaaaaagtatatatttttcagtacgaattaattgaagataaagataagataaatcaacgtaaagaagaaattgggatgtttgttcttataactaatgagttaaatgaggaaaacttaagtaacaaagaattgcttatggaatataaagatcaaaactctgttgaatcaacatttaagatattaaaatcaccaagttatgtagatgctatatttttaaataagccagaaagaatagaagctttcggctatgttatggttctagcagtattgctaatgaacttaatagaaaggcgaatttgtgaaaaattaaaactagagtctgaagaaataaatcttcttggtagaagaaaaacattttcgcctacggcaacggcattattcaaagtttttgaaaaagttaaagttgtagcaattcctttaggagcaggaattcaaagaattattcccggaggattagataaaaatcaaaaacggattttaaaattatgcggactaggtgaagaaatatatctagaaatcttttccaaaaacaaagatgtataatgggtaagggcattttgccctttgactgtaaaaattttaaagttataaaaatagatgacaatatttagaatacttgtccaatatttttggaaatatattcactaaaattgaattagcacatcataaatgctcaaatggaaagtttggcaatttatgatatgctgaatgcgggttttaaacttataattttttatatgcttaattttaacgtcaaaaaagcccctgtagaaaatacttctacaggggcgaaacttctatttcgcgataccacccttttccctaaaatgtcaccattttaggctcttcaagtacaccatctccctaaaattatagaattatagggcaaatcatactctggttctgtaacgtgaacttacgtcatagcatcacttataatgaatttttatcttatagtttaggcgtaagtaacatcacatcttcttcaaatgcgagttataggttgcactctctaagataattcaaactaaattcagcgaaaataaaattccacctaaaaaagtttaactttataagatccgtatgcagctccgagacttgtttcattatgatttcatagtttcctcacaccaaatggaaactctctgagtattccttcataactactcttctcttcatagcttttatttttgtacaattatataccttatgatattaagtgtcaattatattgtttaatagtttttcatctatttgaaatctctaaaacttttattatatagatgtgtggtgtaataatttttaataaacttattaaaggccttattggttaagagtatgttttgctgttaattatttgggttttaactagttttcagtatgttcttactagttatattaatttcttgttatatgaatagcactaaaccgctagcgcggtggcttagttaacatttactaatctaatttgtatatgaacctttttattaggaaataactccaataaaaaggagatgttttaattatgacaaaagaacaagtcttagaaaagttgaaatttgatgtggagcttagaggcctaagcaagcatacccaagctgagtactatactaaagttaagatttttcaagatcactttaacaaacccgctactgaacttaacgaaaaagatattagaaaattcctacactatctttcaacagaaaaaggtcttacttcgggaagtgtaaattcatacaatagtgatcttagattcttatatggtgtgactttaaatactactttgaattataaataaatccctcgccaacgtaggcagcgtaaatttccagaaatacttactaaatccaaagcctttttaattcatgtgataatcttagagacaaatgtatactaatgactctctatggtgctggactaaggcttagtgaagttgccggtctaaaagttactgacattgatagtaaaaagatgcaactatttatccgcaatgcaaaaggctctaaagatcgctatgctttgctttcgcaagctaatcttgaaattctaagaacttattagaaagcttatcgtccaaaagaatggcttttctacagcagagtaaacactggaacacatattacttctaagactgtgcaaaatatattccacaaatatatggaaaaagctaatatttctaaaaaagttaccgttcatagcttaaggcatagtttcgctacacatctacttgaatctggcataagtatatttcatattaaacaactactcggacactcagatatcagctctacgtgtttttatttgcatttacttaaaattcaatctttaaatgtacagagtcctctagatttcttgacagaaacggagaaaactaatgcttgaggttcaagatatatttaaagaatatggtgaagactatttaaaataagcataagcttactcttgttcaacataaagctatgtctgcaatacgaaaatgcagaacttcacatttaggtggccatgttgatgtttgtgatagttgtggaaatactcagatttcttataactcctgccgtaacaggcactgccctaaatgtcaaactcttgctaaagaacgctggatttacaatcaaaaatccaatttacttaacgtaggctattttcatgtcgttttcactattccaaataccataaattctatggtatatcaaaatcaaaggcaactctatactcttttatttaaggctacttccgaaactttatctgaattatcctctgataaaaaatatcttggtgcaaagcttggttttacatcgattctacatacttgggggcaaaaccttatgcatcatccacatattcactgtattgtacctggtggcggactatcgtcgatcggtaaatggataagcagcagaaaaaagttttttatccctgttaaagtactatctcgtaaatttaggggcaagtttctgtattatcttaagcaattatactatgaaaataagcttgaatttcatgggaatcaaaattatctttcggatgaaattgaattcaaaaaacttctttcagctacctattctaaagagtggattgcctattgtaagccaccttttaaagatgccgactgcgtcgtcgaatatttaggtagatacacacatagagttgctatatcaaatacacgtattcgaaacattaacaatggcaatgtcacatttaaatggcgtgattacaaagataacaataaatataaggaaatgactatttctgctgatgaatttattagaagatttcttattcatatacttccaagtggatttatgaaaattaggcactacagcttgctgggtaatcgaaataaaactacaaaacttaatatttgtaagcaacttactaatacacctattttacttagatctaaaataccaattcttgaactaattaaagaaattacaggtagagatttatcaaaatgtcctcactgcggttcaaataagctccgtaggtctattacattttgtaactctcctcctacaaccatcaaaacttcataacattcgtagtgtgcctataatggggagggggaaactatacctgttttacaatattcattacttttttgtatctttatcaccgtatttttaaatttaacttttaaattatcctctaaatttggtaagtgtgagattattcaatccccataatgactgcttatatttccgcggtttcgtgctattgtaattatccaaagttaggcgaacttctgtaacttttaaactcaagccaaaatcaaggtttgagtttttttctgcctaacttcgtataatttgctatgaataattggtagttgtatttaatattatagttatgttgttttctcttttaaatacattctttttaacttcacttcaaagtttataaacacttaaaacaaaaatgtttataaacttatttatatgttctaaaaaaatatcttataatatatgattctctatcttttctttgaattcaatccattcaaaatactcatatccatcttttttatttttataaaaatagtaatttggcttagtagttagtattactgattttacttcaataatttcctctaagaaattttcgaatagctttttaatagtttcatccaaattggttttcattattttttctcttcttaatactttttctattactttttcctttttcactttgtcaatttcattacttaaatcattaatcttggtaactaacatttgataatttttatattctaaattatataatctattagtaaatggagatataaaaataatatcaatatcaccatattcatttttatatccaggataatttgaaatttcaatactcggaatgaataataattcgctttttctatatttctttttttctatagggagtatataattatttttgtataataaatcagcaattttatatgtcattagtttattatagttatttttattacttgtattttcattaaatccaaaataatattttattaactttgtatattgttgcatttctaatgacttattaacaatttcttgcgttgtattcatcattatttttgaaataaatacatattcatcatcaatatatgaaaaacataattcattttcattctcttctaaattttcatttccttttgcagagaatttattaatgaaatttttaaatcttttttcatagaatataaaatcacttttttttattataataatatcatcatatggaatatttaaattatctttttggataatttcatataattttttatcacttttttctatagcttttctataataatcttttctagtatcctttataatactttgtgtaatatgatcgattgtgagctttctatcttgaagatcttttcttatatctatagatgaaatttcatatgtattcatgtcttccttcatattagaaacagcaattaatttattataatattcattatagctcacatcatcactatcagaaataaccttattatatactctcatattctcaatatagcaatatattagagtaaaatattttcttatttgattttcagcttcttctactactatctcttcctgcaatatttttttgttggataataaatgaaaaaacattccgttacatattttaaaattgtatgtccatctttcagataatccgctattcccttcatacattttttgtttgcaaacagctctcatggtaaaaagtgctattactaaagctctatttcccttgaattcctgacatatctttcttgcatcatctaaaattaacttgttcatcttataataatcattttttaatgtattcaattcaatacattttaatttatagttttcttctattgcagtatctaacaaatttaagtcaattacttgtgttaaaatatctatatatacattaatttgttgctttaactttaaattaaatctattcatttaattatatctactccttaaattctgctattaacctattacttatatgactgtttgagaatgacatacatcttcccatctatattttcttttggattatcactaaaatatttaaatccgtaaaactcaaaaatactgattattttttctccaaattcaaaatattcgctttcatttatccacgaagggtattcagaatattttagtggtacatactctttaataaaattaaaataattataaatttgagtatatgtattttttgtttcttcaaacttttgtataaatcttatatcatttgtagctttataatatgccaaatgagtgattgtagcaattaaaaatctcatgataggttcattcacatcatcatttaagttcaccattccagcatatgaacaatgtgatttcataaatttaaacgctttatcacaacttataatgcacttttcaatatcaaattcatcatgtacttgataaaaatgacagttattataatatgcataatattcactaaaatagcgccaagatagataatttacccaatcattccaacattgaatatttttttttgaacgatattttactagagtttcttcaccaatctttaatgaagttgttatcatttcttcacaatgaaataattcatgttgaaaagttgatactaattcaatttgtttattatcatcttccttaaataacttttcgttcagtgaaatgttaaatttcaacttaccatgacgtaatataggttttacacatccatttgcattgtttagagaagtaatatttatgcattcaatatattcttgcgaaataccaaattttaaaaaggcatcaacaataattgctttattaaatctttcaacattactatgcacaaccttattaatcaaactttctacattagctccaaaattatcttgcgattttacttcattgtttttatcattattattaactcctaacttttcacccaatatagatctgaaccataaaataatattcagtttcaatcccctctttcaaaatactttaatttttatacgtagaattacaatacggatgagctaactgtccattcccaacatctccagttcctccatcttgttttctttgtttgtgatctattgtaatagaattaatatgtaaataacctccacagaccgcacaacgtggcgccgttttcaatgcttctaaaataaatacacttgattttcttccatctgagaatctatcacttgtaacttcatctatgctcattacttccttcgatagatattgaaattcttttaacattattaaggcttttattgtctcttctacattatatccctgtaaaagaaaatccattatctttatataatatgttgttataaatttatgccctctagtagattgcctgtaccttctcacaatagtttgcaccaaatattcatagtgaatcataatctcttcaaagttctttctaattttaataaactcattaaatcttttattttcatccaaatattttataaaaccaagtatcgcataataagatgctatcttatgcattcctctcatattataaaaatatactattggatgtaagcctaatgaggatacatgtaatgaattaactcttcttactatctttctgcagttctttaaataattaattgtttcatctcctttttcgtcaatacctaattcttcttctccctttaatccattggctatatttatagtttctaaaattaattgttgcccttgatctgataataaaggacctccgattggtaaatctaatgtctttataggtgttttatattcaggcaaaaataatatttcatttatttccttagatattttatatatttcatcttgaactaattctgaaaactttgaccagtaattatggccttttccacttctaactattgctcgtgctgctaatccatttccagcatttctagactttatcaatttaatttcagtaggactaattggtgttccttgttgattgattctaaagaaagactcttccgcctttaatgaatttccttctacccattgtaattgtagtgctaatgatcctaaatttttagctctcttatttttttcatcgtcatcacaaggcttcctcgttatactttttaactcactataacttccaatattattattaattaaatttctagtaatttcagctgcttttatctgctcttttggaatatcattatcaaaaaattctcttgaaattggtccatctccataatcatcatttacccatgctgcaagtgcacttattctatgtgatccatctataacaaatatatgattagacatacttttccataatattatacttggaataagttctccctctataaaactaagaactaactgatatattttctctggtgtccattcattagtctctcgttgaaaatccggtttttttattgctgaatacataaatgaattgtaatctaaatctgttacagacattgtcaaaacatttctattaaccgcaactccactttcatctttcaaatcaaaatcttccctaggtatcaatgcatctaatactacttttgtaaccatatgtatcatcctttcataatgaattttctaaacttagcccaatatttaaatacgtctctctcattgcttgaactgataattatagacattataaaaataaactcttatcattatctatcagactatataacccattataatctatttttttcatacatggaataattatctaattgcataaaaaataaatatgacaaaattcgtttatgctaagacattataaatctcttaaatattctttctaacttatattgctaatctttattttccctaattcttcattaaggaccaacactttttagtatattttattatccctactatgtaaccaacttccgctactgaatcccgataccattttacaaatatagataaatcaattaagaattagacttattagatgaacatatttacaaagttgctaaaactttaagtttgtatcttcactagaaatcataaatatatttgtgaagaaaacatttgaaaatgagctgttaaaggttcttagctgtaggttgttccattttagcttgtcaagctgaaagttggagcatgctaaagtggctacaacctgctgcttagaaccttcagctatattttcatagcttttcggaatcaaaatatttatgatttcggtaaagttatcacataagtctaattataaattttatttattacataaataattttcatctacttatgtaataactgaaatttatacatatatcctttatgaaaacaaagtaaaggaggtaatgaaacatggctgtaactaaaactattgactctgtttctcttagcattgaagttcaaaaaggtctagacaaggctggggacccaatttataccaagaaaactttctcaggtattaaaacagatgctacacctgaaaatgtctatgctattgcagatgcaattaaaggtgttttagaagctaacactagagattactttattaatgaatcttctagtttagcaaatgcttaggatcacttttttaggaaactctactcacattcgttcacttaagtaaattttaaagattggggggaaattaaatggaatatactttagctatgacttttttaacttctgctggtgaaaaaagcactttaagtgtttctggtgttaaaactactcttacaaaagatgaagttaacacacttatggacactataatttcaaaaaatgtttttaaaactaaggctggcgatctagttaagaaatccggtgctcaggttactcaaagacaagttactaaatatgaagtagcttagttttaggtaaaattatagaagcttatcccataatagatgagcttctatttttttattatctttattaagtaatttgattcatgactcattaatttttcttcttataaactctattcccttttgaaatactattttagatcctgttaataacattaattaatcttctttaacagccacgccatattttgtcctaaattatgcatattattgattccttcttcatctttaaatatatcgcccacatcttttccataaaccatattccaatatgtagaaccagctataacaacttctttgtttaataaaaaatgattcattgtatctactgctgtcatacctccagctctgcgaacagcagatatagatgcacccaccttatgtttaagtagacctggatttgttgcaacaacaacccctgccctttctaaaaaagctttcatatttgctgttacatctgctgaatagactggagaactcaaaagaattccgtctgctaacttcattttttcaaaacattcataaaacatgtctttcttaaaaacacaattattctttcctttacatgcaaagcaccccttacaaggctcaattatattaccagagaattgaactatttccgtctcaattccttctttttctaattcatcaaaaacaatcttcataatcaatgctgtatttccatcttttcttgaactaccattaattcctaaaaccttcatctctccacctcattaaattacaacttatatttttttataatatattcaccatgtcaatagcacatgatagcgcttttttccttgtcatactattcaaaactagattttactaccacgatttaatatttatctgccggccgaaaatctccttcattctttcataaagctcttgcttagactcaaacaccttgtctttgcagtagataaacactttgttgtctactgcttcaaaataatacacatctgaaatacgaatcctgtgaatattacatccatcataaccaagaaccacagctttttctgtttttaatttgcttattaattttaaaatatcatcattaacctcatgacatttaacaataatttcttcttcaaattctcttccaatttcctcaatagatattttcaccacttttattttaattgtttttagcttacaaaataaagtattttatctactcacaaatcacatttttttacacaactgattctatcaattatcattttaatttaacacacatcttttgacacgctctcgcttccttttatagacgttataagaataaaatcttatcattatttacgaatccatatatctgattataatccaattttttcatgtatgaaataattatctaaataaatgtaacaacacttatcatgctgctacattataaatctcttaaatattttttttattactcatatttgaaataatttaactaagactttggatttgcgataataataaatctattttctgcttgcatagtaaacatgaataataagaacgataatagctttcttcagtataccgtattataagttcttcttaaaaaggaaactatttgctccaaagatttttccacatacatagtaaaaggcagactaagtatttttgcctaatctacctttattgtagcttttattttttcatgcattactattaataaatcttattgatctatctttctcgttttaatttaaaaatttcttcaactgcttttttataaccaccagattctttaaaagagtcacttatttttttaatattttcaagataacttgagtcagttaaaactttctcaacagattttcttaaaatttctggagtaatattatctttatcaagagaaatagttgcacctaacgcttcagctctttttgccatatatggttgatccgcacttataggtattgctacaaaaggcacattgttatacaataagtcactagtactattcatcccagcatgagttattgctacatcagtatactttaaaacctctgattgaggaacataatttcttacgatgaagttattaggtatatcaaatttagataagtctatattatatgctgtcattacaacaacttcatcagtattaccaaatgttttaaagaatatatcatatagattgctgtcagtattattaaacactgtacctagtgaaatataaacaactttctttccctctaatttttcaaaaggaaaatctaagttttcttttctatcatagattggtggacctataaatttaaagctatcatcataatattctggatgtgcaacaaaatatttagaggtatatgcaatatttatatcacccttattaaaaaataaatcaaagatattatgggacatttccacattaaattcttcttttaattgtcttgaaacctttttataagtctctataactggatgattttttattaaattttcattcattaattctttgtgctgagatcttaattctttaggagttgcaaacactgcaaatgaagaaactgaaggtattttcagtatttgagcaatgatacttccaaaaggaaacatggctgtgtacataatataatcgaattttttgccttcaatttgatttaaaatatcttttataattttatcacttgatttaagcgtttcatttatataatcaagaagtttatctggccccatatcactagaagtcttatgtttccttttaaaaagactcagttctactctataacttttaaacttggcacctgttttttcaattttttctttaaaatcttctgagcagaaatatgtaatttcttctccttgttttactaattcatttactaatcccaatgtaggatttatatgaccatgcgcaggtatacttaaaaaaagtacttttgacataaatcaacttcacttccattctttatatttccacttacatattctcataatactcatagtaattaaatagcattttctctaaacgtccaaatccacacattaaatgtaaattcctcggtattaagtttagatttttgaatcagaatatattaataaatatattctgcattttttcccatgtatattattttttttgcatgaataagcaaaaattattatcacctttcatatttatcttttaatataaaaagcagtagttaaagacctcctaactactgcttttaaaatttagaatatgatttatattaataaattccatggtgctttatatattaaatatacgtaaatatctagcctttatatttgcatatcctaaaataaagagaatgggggtattactccccaatttttcttcttataaactctatccccttttgaaataccattgtcttaatgtttatctttgtttcaccactaggtactgtgtatttctgctccaatactctaaaatagcctaagtctacaaactgttgatacggaatattatttttatctaaaactttcttttctcttaagagtgagaataaattgtttcttcccattcctcttatagcaagaacctttgcaacatgtcccacttcaatgctatctttagatcctgcaacatcatcataaaattgtcctttaggctctaatagctttaccttattttcagcttccagtcttgcttttctctcttcttttaacttagtcgctgcagcaataagtaaatcaggattatctaataattcatctgtagcatacatccctgtttttcgtatgctaggcaatacctcatcaaagatccatgcttcaaatttctctgctccaggcaattctgatttggctgctaatctataaatatctccttcaggaattatgctcatttctatattttgaataacatctgttccatctctcctctttccagtaactacccctactccgtgtttcacggaccccctgcaatgccttgaaattgcatcattaggctttttatatcccaaagcttttgctatatcaatcccaacagcataatctttattattaatttttaaccatcttatttctccaaatctttcatctttaaaaattcgtaaactctccatttttgtttatccccctttatcagattttatatatatgttccaaaataattcttcaaataattcttaattgtaaattcaaaaaattttacaatgatttaatccataattattcactatgaattgcagtatatattttttcaaaaattaaataactattttcataggttataccctcaagagtcacaatgcccacacagttgtccaataatataatatctttgagaataaaaaaaatcgcaaattcaatttcttgaataatacgattttacaatttactatttatttttagtgatttattctatttgaatattgagtattataatagacaatttcatgtatatattttagtctgtatttcaacactataataaaacatgatcaattatttagcggatttactataataatactaatattccacaactgatttattgctaccatctaatttcattttatacaatttatcatcggacaaattattataatatatccatccatctaatacttcagataacctacttgcctcactattaatcttagttctatccattccatcaatagtaattttataaatatttcctctcatcttatcaagtggtagaatcatagcagtatgcccatcgtaaggattattactatagtatacccaatttccatccacttgaatatcccagctgatatcatcatttaattttttttcatctgtgccattaatactaatcttgtataatttacctccatcatcacgattgctaaaataaatattctctccacttagctttagaaatgacgctaacctatcagatatttttattctgtttgaaccatcaatattcattttaaatatacctgaattttcgcttgtaattgtattatcagtagtaacagagcttgaaccactgtaatagatacaatctttatatatatttatattctcaaccaactgatcagaaagttgaactttatttgttccatcaatatcaactttatataatccacccttaaccacattattttcaaccatttcagggcctaatgcataatatattgatcctttataaaggacagcatcaacaatataatcctcacttgttaacttaactttctcattatcctttattttgtatatacctttactgacagggtgttcagtagtttcatcaacatagtaaacccagccatcagaaacgccaataatgcttccatatgcctgctcaaagtatgttttatttgttccatcaatattaacttttgataaattatcagattcatatagatagtttccgtctttgataattggttttctattgcttacttcagtttcatcacttacatttttatctttcgactcaacatttgatgaatcatttttttgtgaatgaatatctgatgaatcattttgtgatgattgaataaacgctccgtcagaatctaatttgtaatcgttaatagtagtatttttaagcatagcaccatcatcacctaagtaataccacttatcttcatactgtatccatcccattttcatatatccatcttgtccaaaataataccactttccatcaatctctttccaacctactgaccatgaatttccttctgcattccaccatccattagaatcttgtttccattcagcatttacacccattggatttaatacaaatactaaaactactaataatgaactagatattactttttttaattttaatctcttcattttacttctccgatttattttatttaacacatgtctttttctaatataaatcaattatagcactaattgtaaacatcgaattattaaattttcaaagaccatcttttttatttattactaaatcaactctacatgttccacattttaatttaatggcttagcttaatcagctcatcttaaattttctcaattaatctccctttaaggcctccctacactcgttacaaatcagtatatctttaaatttaaaaacccctttatcatttccacaaaagatgcagcctttactgtatttcctgacaactacctcattatcaaccttaattatttccatagaatccccatcattaattccaagtacatttcttatttcttttggtatcacaatccttccaagtggatcaagctttctcactattcctgatgatttcatttttacattctcctctacaaaattattttcctttatatgattaaattatttcttgcatatctcaaattttatatacttactaagccatcataaccacaatatattgagatgatttctctccctgaattactcttgtcttttcttctaattagtatctcaacacttattacacttatatgaggttttctagagctttctttcgttgctcatctgtaaggcttcgtcgtgtttcctttggtttgaatcctgcaaatttgtttttatctgggttactattctttccatagcttctattgacatttttgtttacctccttgtcatctggatatccttctcttctccaatttttcagtattccgtcaatgtaagtcatattaggtttattagcttttaatgctatatctatagccatctttacatatttttgtccatgcactcctatagccaacttaagtgcacctaaattaagaacattaggtattccagatattatttcacaatacttagcaagttcaatggatttagagtttatattctctaaattcttatcctgctcagcaattgagtctttagattgagagacagaagactttaatgattctgatttaagcatagaactaaaatctgcgatttcatgtgaatcacttactttcatgacattaggaatataagtttccttaatcagagatctaaatgcttgtctgttgtgcaaatcactttcgtatgctgcattagaagtaggagtttcatttgcatcataacctatattctcttctttctttatctctctatctttattattctcattcttaatcttgttcttattctctctcttattctgcaccgttacagtaacgttacttttatcatctgtaacgttacaatatttttttgcactatcacaaatatcatttgtaacttcaatgctatattctttactttcagcacagttatgttctccaatttcattagctacagctccaagttgttttttcttttctctatgattttgaactctttttctattttgctctctaactctgtccattccctcaacattttggtgtctttcccaattcactattctgattacgttattttcagctatctcaatcatttgaaaatctgataacactttaagtgcaagtcttatagaagctagaggccttgaaaatattgtagataacatttcatcagtatatgggatattctcatttagatatataagtccactatcattagttttgccagcttgtataagtaatcttatccataaataatgaatagtatctctctctggcattgcatccactaatttcatcttttcatcatcatgcatgttagtagataacttaatccatttaatatctgacatgtttctcactctcctttaaaataaatgctttaaatcttcccaatttttccatgaaagcattaatctcatggaagtacatacatccgtctaatgtctagacattctaatactccaatcacttctgatagaagttaaaaacgtacactcttagacatttttaccttgtggttacattgtgccccttgtgggtataagttcaactaaactcaccttaaatataaaatttaacatgaaaatttttactttatatactctaagcattttcaagtccaaactgtaaacctattttttaagattattaaaataaaaattatatttttcttcgttcatatctattaacttataaaaatggattctaaaattgccttaatcctcctcataatttaattctcattaataaaggttaatatctattaaggtcatatatctgactagtcaatcatggctttaaatttaggtagaaatgaattgttgaagaaatgtgagattacttatatactcattattaataaagaaattgatattgaaatacatatcataaaatgagactaactatatgaagtcaatataagttaataaaaaaattatattttttagtcaataaaaaagtgcatgacaaataaagcaatcacattgcttggaaaattaaggaattaaatttgtgaaacaaatgaagtattggtttttaaaagataaaaaataacacgtattagtttttttgctacatggctcatagcaatatagtaatgcttgccttcactttgcttctttgcaagataatccccaaaagtggaatcacgcatagaaacagttctagatgctgttaatatagcccaacgtaagtaggtagaaccacgtttaaccataggtgtatgtgtagcattatattttccggattgatatgttgatggatcaagtcctgaaaaagctaaaagctttgctggatcagtgaatctatctatatctccaatttcagctagaattattgaggctagtgtataagagattccaggaatactcattaaaggagagtctatttctataacaacatcctttatttgcttatctaaagcatcaatttcagcttgaacagatcgaattaacctaataatttgctgaagttcaaaagataaagaacgtgtgctagttccgatagaattgctagctacttcctttatttcaatagcttttgctctactatatttgcctttagtggatttagccagaaggtttgtcaatttagttaaatgacaattggatatttccttcgggctcggtaactccgataggagagcataaacagagacttgatgaatagaccaaacatactttggtaattcgggaaaaattatatctataagtctagtaattgatagtttaagcctagatctataaccaattaagcgatatctatgtctagttagtgactttagctcttgaatttgatatgatacaggtgaataggattttgtatcatcagagaaaagcattttagcaataactagtgcatccgttttatcggttttagttttcctaagggtttgagccttacggaaaagatttgtagctaaaggattgagaatggataggtgaaagcctttagcatacaaatagttttggagattagtgctataatgacctgttgattcaagtcctatttttacgttagaaatatccttgttaggtaggacggaaagtattgaagaataaagtaattcaaaaccttcacgtgaattggatatacgtaaagaatcattaataataacaccatctgaatcaataatgcagcaatcgtgtttagctttagctacatcaatgccaatataaatcataagaacaactccttttttaatttagtccgctatgctccacgtagcttcatgctaaatgtatccttgctctatataaaacgtcatgcgttatctaactaattaacaaataagcataaagctgtggttatatcctcaattgaaatagtctagctataggtgaaaaaactaatccacagcgtcttatgttaagtatagtaaaaattattaagaaaggaaaagtataatgaatttttactacatgttcattatacaaggtgaatgcatgaataatattaaagatcacatattacaattagaacaggagttgttaaaatcagaagttagaaagtcagctgatagaataaatgatatcctgtcaaatgactttattgagtttactagctctggaagtgaatatcattacaaaaatggtgatgtatttcaagaaaagaataatattcaaacattatatggagaaatctcagattttaaaataaaggaactggccgatgattgcatattagcaatgtataaaataataaagctcaatgagttggacgaaaataaaaaatattcattacgcagctcaatatggaaatgttttgatggtaaatggaaaatgattttccatcaaggaactttatcatctaagtctgaaataatatagataagcattatattagaaagcaaaaatatttttatctctgctttctaatataatatttattacaaaatacattttagttctctaatgactatttattataaaatccagatttgatcataactgcatttatataattacaaaaactgatctcaatatgaatatcacaaactctttccgcgaataataaataaaaagtaaggtggtgatataaaatgggatcttctcaatacaatagaaataagaatgacaagagcaatgttgataagatgaaaggcaagaataatcgtgataaaggcaacaatcaagttggctcaacagataatggaaaataatctattttacttaaatatactataactaaattaacatcaaatatataacccaaaaacacagcctatatatttaatcactaggctgtgtttttttacattattttttatataatttttgagttcaaattttaaagcactaattaagccaaagcacaaattcactaaaaaatctaaattccacttataatttagaccatactagaaagagagaataatcttttttgtagtattgcattgagaaaaaagatgtaagatttcttcattagaagttgttcaattattgtttgtcacaattttatattgggaacaaacagtaattggtacaacttctagtgttagaaatcatcagcttttattctccagcaaccgaaacaacagagtactatccacttcgattggctataaattatagataaaccaatcataaactatacttagactatgaaatatcttctaaccagaaatgagtgatatacttttgtaaccacaagggtcataatatggaatgtttctttggcaattttgatggaaatgattctttggctataagttgttccaaatgtgctagttcaaattttaaaatacttaataaaataaaagtacaaattcaccaaaaaatctaaattccacttataatttagaccatactagaaagagagaataatcttttttgtagtattgcattgagaaaaaagatgtaagatttcttcattagaagttgttcaattattgtttgtcacaattttatattgggaacaaacagtaattggtacaacttctaatgttagaaatcatcagcttttattctctagcaatcgaaaaatagagtattctctctttcggttgagtatgaattataatctatactgcgtcaaagaagctcatttgatcactttctggaaggccgcttaaacaatcaaattttctaagaagctctatggcagcattaccaatctttgaacgtttctttacatcatctactgaattaaattccttttcttttgctgcacttgctataccttctgccgctacatttcccatacctgctatactgtttattggtggtcttattccatcttcttctagctggaattttgtagcactagatttatataaatcaattggaaggaatttaaatcctctttcatacatttccaaaactatttcaaggtcatcatacatatccttatctttaggaccagcatcatttccaagagcctgaatttcctgcatctttgctttaaccttttcttttccaaagatcataaattctgcatcaaaggcttttgctcttatagtaaagtatgttgcataataagcctgaggtatatgaactttaaaccatgctattctaaatgccatcattacataagctgctgcatgagctttagggaacatgtattttatctttttacaagactctatataccattctggtacatcatgttctctcatcatagcttcatattctggaaatttaggttcttttaaggctttacctttacgaacagtttccattattttaaatgcggtattaggtggaagtccttttctaattaagtaaaccatgatatcatctctggtacataccgcatcacttatgctggtaattactccattatcaattaagtccttagcatttccaagccatacatctgtaccatgtgaaagtcctgatatacataataaatctgagaaagtttttggttttgtatccacaagcattcctcttacgaatttagtaccaaactcaggaattccaaaggttccaacctctgaatttatctgctgtggagttactccaagagcctttgttgagaagaataaggacatagtatccttgtcatccataggaatctcatgtgggtcaacccctgttatatcttgaagcattcttataactgtcgggtcatcgtgccctagtatatcaagcttcaatagattttggtcaatagagtgataatcaaaatgtgttgttataatatcagaattagggtcatcagctggatgctgcacagggcagaattcaaatatttctcgtccctttggtacaactataattccacctggatgctgacctgtagttctttttatcccagtacaccctactgaaattctcattgtttcagccttgtttattggaagattcttttcttcataatattttttaacataaccaaacgctgttttttctgctatagtaccaatagtccctgctttaaatgttgttccctttccaaagataacttctgtatatctatgggcttttgcctgatattcccctgagaagtttaaatctatatctggttctttatctccattaaagcctaggaatgtttcaaatggtatatctattccatccttatgaagcttttctccgcatacaggacactctttatctggtaagtcaaagccgtttagaacgccataatcctcaaagtcagaatacttacacttaggacatctataatgaggcggaagcgcattaacttctgttataccagtcatatttgcaacaaaggatgaaccaacagatcctctggaacctactaagtatccatcttcatttgatttccataccagcttctgagctatgatatacattactgagaatccattttttataatagaatccagctctttatcaagtcttgcctgaactatttctggaagtggatctccataaagttcatgagctttttcataagctatatcttttattgtctgctcacagccttctatatgtggtggacatttttcaggagaaattgggcttatttgctcacacatatctgctactatattagtatttgtaactacaacttcataagcttttgttcttcctaaataagagaattcatcaagcatttcttcagtagttcttaaatataatggtgcttgattatctgcatccttaaatccctgtcctgcttctaatatacgtctatatatttcatcttcaggatctaagaagtgaacatctccagtagctactacaggcttacctaatctttctgcaagttctacgatctttttattaatttcttttaaatattctttatttggaacttgctcctgccttactaagtaatcattattacctaaaggctgaatttctaagtaatcatagaaattagcaatttcctcaatttgttcttctggttttccaagaagtattgcttgatataattccccttcactacaagcacttccaataattaaaccttcagaatatttcttaaacatgctctttaatatacgtggctttttataaaaataatctaaatgtgaatatgataccaatttatataagttctttaaccccacgtaattttttgctagtattattgcatggtgagttttaacctttttatatgccactttcttagcttcttcgtcagctgcatataaatctatatctgatagggtttgtgcgcctctttcttttagcttttcaatcattatgttaaataccttaacagttgtatcaacatcatctaaagctctatgtgcaacttcaacctttattccaagattcttagcaattcttcctagcttataagatttataatcagggaatacatcttgcgctaatcctaaagtatctatataggtaaaatcaaactcatagcctaaaactttcgcattatgctttaagaatccaatatcaaagtcagcattatgcgcaaccaaaacacttccttcaataaattcaagcaatttagggaaaactttatcaattgtttctgcattttttaccatatcatcagttatctttgtaacctctataactctcatagggattgacttttgagggtttacaaaagtactgaacttatctataaccttgccatccttaattttcattactcctatttcagtaatcttttctgtctgaggagaaaaacctgtagtttctaaatcaagaacacagtataccgtatcaatactttcttccctaacatttgttacagatggctttttatcaggtgctaggtaagcttcaactccatatataactttcatatctggattatctcttccaagcaatttgtgcgcttctggaaatgactgaaccactccatgatcagttatagcaatagacttcattccccagctcatagctctcttaattaaatcactagcactagacatagcatccatctggctcatttgagtatgcatgtgaagctctactcttttgacctcagaattatcctgtctcttatacttctttattccatttgtttcaataacagtgttagcaataagttcaacttcatgagagaaattactatatcctgcatttccagcaagtctaagccccttggccttttttattctagaaaatacttcatcatactcattaggctttgcaaaaatcttacaagtcatagaatttgatccatcatataaatcaaaggaaattaacatctttccacttcttaattcttttgcttctaaattagatatttcaccttctaaagctactcttccctcatcaggtgttatatcattaattttaattatgttttccttaatattagcatttcgccctaaaatcaagaatggattacttgcctttttgccatcaccctcagcttttacctctggcttaccttcttcagctttaggtacttcaggaggattattgctttggttaatttttatttctttaataactttcatctcattagcacgtttatcttctgcaatttttactaattcttcgctatctatttggtcaataaagttgatattataatgtttcccgtacatatgctttatagctttattaatttgcttatcatattccatggtttttagaaaacctgctacaggaattttaaaattaaaatttatagtatttccttctatttcatagtcactattattaaccgctgcctttaatgcaggatactttgtagataaggaatatacgatattcttcaattctttttctataggtcttatttcaacctcgtcactatactttacaataattttagaatcatttaatccgaatttatcttttatgaaactattgaaactttcaatttcccctagttcaatataattatctgaactaatttccatttccagcactttagttttcttacgcaagactacggattgtataacggcagtatttatgctaccagccgattcataatcactaaaagcttcatttattctcttcatactactcattaaccttttctaaaaaattttcagtatgctactattatatagattaaacttgcgatttgttaagcttcaaaaaaacgcatagaaataattctatcaaaaaagtattcctatacctccctcatatttaatctagataatatttatattatttttcaatctcaactaatttttcatttgtacaataattaatcaattagtagttttccgacatctaaggcatatgaattaaaataacaagcccaaaataccatgattatttttcattaggcgaaaaagcagattggactcatagcaagtctattagttcaatttgctgatgaagcataatggaaaatagacttggtagatggacttggtattttcttgattatgcctaactatcattccataatctaataatgttgtcaaggcaaaagaatgtttgctaattctattagacgttgaattcactagtaaattaataaataataaaatttgcatacattcttcttagagtgaaactatttattttaactcagaatggcacctgccaaccgtttcctttattgccatagcgttctcattttctgatgaaataactaactgacttatgtaattattattaaatatctcacagtaaaattccttactcatttcatcaatttcttcataattttcacttaacttctttaataaatcctcttcaccaagtccagcattatctataaaataatataggttcattctatttacatattcttcaattcttttaaaattatacttatttacaacaaatcctattacataatctttatcagtttttttagttcccttttttatgctaataccaaacatagatacttctggtaccttctttatttcaaacttcttatatgctattcttgaaattcctaaattctctactatttcttcaactggaacctcatgttccacttgatttccaaaatacaacattctagagtctaaaactattaaacaaaggttttctccaatcatttcatttaaaacctttactttaaattcatcgcttttcttcattccatagtattccacgaaagttttaactccatcctcatcttcttcgcttcttacctttaatttattcccgccaaataaaaacatattttccttctccttcatcaagtgatatataacattataatatataactgcttgtttaataaattaaaaactgcagaaatttaaaataatattttaaattcttatgtaggtatctatagataaacaaccatacgcgtaaagctaatgagtattttaacagttaaatcatatattaacagttataaaaataataaaaaaagtcattcctaacaataaacacaaaaaagaaaggaatgacttttaatgaaaattaatttaaattcattaagtagtatggataaaattaagaaaattattaatcttttttcaaaaagattaataacaaaaaccgccgtgactactggatttacacaaagaaatagtaaattggatggatttacattttttaaagcatttacttttggagtttatagtcttgaaaatccatcattaagaaatatagcaaatttctgtgaagatataaaccctaatttgaaagtgtctaggcaagctatagaaaataagctcaaggcaggttcaaactttttaaaaactattcttacaaatattattgaggataaaataattaagagcattaaacacaatcacattgaaatatttaaagcctttaatgatataaaaatctgcgatagtagcttaatcaagctaaatgactcgttaagagattcttataaaggtttttcagaagataagtcggcatctgaaatgaaaatacaaacagtatatagtttcaaaagtaagcagattgaaacatttgaatttgaggatggcacaacaaatgataattcatatatgaaaactttggcggacaaaattaacactaatgaaattctattagttgatttaggatatttcgataaaaagtgttttaaaatgcttgaaaagaaatctgctttttttcttagtaaaattaaatataatactgcactttataaagaaaattataaaaaagggaattttgaaaaagttgaaatgattgatttcttaaagaaatcgagcggtgttatagatacttatttatatgttggaatgaaacaaaataatagagaagaatttagagtaataggaaaaagattacccgaagaaattgtgaatttgcgaatccgaagggctagagaaaaagcaaaagctcaaggaagagccccaaagaaaatcgacaaggaactaatgagctgggttattatgataacaaacattgaaaaagaacaagccgatgtggacatgctccttgatatttataggttaagatggcaaatagaactcttatttaaatgctggaaaagctacggaaagattgaccatgtcaaatcagcgggaattgattacttaaattgtttgctttatggtagattgataataactttactaataaatacagtttattctgaattgtattttaagtataaaacagaagaaaatagagaaataagtatgctcatgatatattcaactataggaagtaaacttaaagaaatatgccttaatttcattcctaaaaaggaaaacttggaaataatatatgagatactagtaagtttaggaaggagctgtaagcgagaaaaaagaaaacgccaaactacagagggaaaattaatgagctactctcttccccctacaatttggtgattactggttaagctttacgcgtatggataaacaacttagacctgaacttatgcatataactcaccgaaatcataaatattttgttccgaaaagctatgaaaatatcgctgaaggttctaatcagcaggttgtatccaatttagcatgctccaactttcagtttgacaagctaaattggaacaacctacagctaagaacctttaacagctcattttcaaatgttttcttcacaaatatatttatgatttctagtaaagatatgagcttaaaattctagcaattttgtaaatctgttcatctaataagtcgaattctcaaattgaatatctatagataaccagactaaaacctgaacatatgcgtattcctcaaagaacaagccttgaactagcacatttttagggaaagtaggacgttgatgacgtcgctcaatcagatgaaatattctttaaagaaagccaatatatgcaggacatactcaatgtaatattatgctaattatgttataattagttgaatgggtaactaacatataattaacaataaaaagaaaggatgtagcactatgtttaatctctctaaaaaaagttttttagttgatttggatgattctttaacttatccatcttcacagacaatctgcaaagctattgaaaaatattgtataagttccaaagaaaagtgccagtttgtcagtaccgaaaagccagttacattctatttggaggataaattattttctactgaaatcactatggcgcgaggtgggtatatgattaagtgccttgaaaaatagtaggtggataattcccctattattttttaatatatttcaacattataaaaaaataaccgaaattaaatgcatatttgttcctacatgttaagacgatttctctagaaatttctaaatggaaggttgctttatattagaaatattaaaaggaataactaaagtgctgtttactttaattattccttaaatttaatatcttaatatttcagtattatctctacttaattatagagctttatttttaacttcattatttattctttctattaaatcttctaaatttaatgttccctcatctccattacttctactgcgtaatgatatattattttctgctgcttccttttctccaacaataataatgtaaggaaccctttcatttctagcttctcttattttgtagcctatcttttcatctttctgatcaatttcaactcttataccttctgagcttaatttatccttaatcttttctgaatagctattaaatttatttgatataggaagtatttttacttgaactggagaaagccatgttggaaattttccagcaaaatgttctattaatattcctataaatctttctatacttccaaagactactctatggattactattggtctatgcttttctccatcactacctacatactctaactcaaatctttgaggcaattgaaaatctaactgaattgttccacattgccaagttctacctatgctatcttcaagatggaaatctattttaggtccgtaaaaagctccgtcaccctcatttattttatattcaagatttaattcatctaaggcacccttcaatgagctttctgctaattcccattcttcatcacttcccattgaatcctctggccttgtagaaagttctaaattatacttaaatccgaattttgaatataccttgtcaattaaattaataacgccttttatttctgattttatttgatctggtaacataaatatatgtgcatcatcttgtgtgaatgctcttactctcataagaccatggagtgctccagaaagctcatgtctatgaactcgtcctaattctccaactctcattggaagatctctataagaatgtgattctgatttataaactaacattccacctgggcaattcatcggctttaatgcaaattcttcttcatcaattgatgaagtatacatattttctctataatgataccaatgccctgaagtctcccatagtttcttattaagcattattggagtttcaatttcaacataaccatcttcgtaatgtaattttctccaaaaatctattagggtattttttaatattactcctttaggaagcataaatggaaatcctggaccttcttctgcaaaagtgaataactttaattcttttcctaattttctatgatctcttttctttgcttcttctaaattatgcaaatgcacttctaattctttcttactagaaaatgcaactccataaactctttgaagcatcttatttttttcatttcctctccaatatgctccagcaacgcttaatagtttaaatgctttaatatactttgttgatggaatatgaggacctctgcaaagatctatataatcgccctgtttatataaagatatcttttcagcttcaggaagatccttaataagttctactttatatgtctctcccttttcctccattaattttattgcttcgtctctagaaatatcaattctttcaaagctaagattttcatctattattttattcatttctgcttcaattttatctaaatcttcattggataatgagttttcaatatcaaaatcataataaaaaccattatttattgcaggtcctatagcaagttttgaatccttataaattcttttaactgcttgagccataacatgagaagtagaatgtcttataacttcaactgctttttcatcatcataagttaaaatatttacctcatcattattttttaatttataatttaaatctactaatgtcccatttacttcccccactactgcgactttagctaagtttttactaattgaatttgctaaatcataaatactagattcatctgcaatttcttttattgatccatctttaagttttatatttatcataaacttgttacctccttctttaaaatttcatgacattctttaaaattttattgtattagatatatctatagatatatgttgcaattcacaatgcacatttcacaattcacaattacggataaaattcttgcaatatttttagaattatgatgaagaattatttttgcaatatatagattaataatcgataacacaacttcttccaaattgcgtctcatacttttttaaattcatatatttttgtacaaaaaaagcacccgtcccaagccttgggacgaatgcataatatccgtggttccacccaaattgaattaaataaactcaattcttctctaaaatttttaacgattttcaccgatggcattttacaaaatctgctaataaaccatagctccagggtagtttttctcatagtcatatttagaaatgcttacagtcggtgacatttcctctctgaaaactgtactctataatacttttccctttcattgcctgcgaatatttaattattaagagttacgtgcactttgctcttattaataataaatactagcacttttgtagtatcttgtaaatagtttttactacaaaaaattttcttgcttccataaactcagttaaaaccatacttatgtgtatacctcaccgaaatgaataatatacttttgttccagtttctaggcaattctgatgggtaattctaaggctataatgttgcacccaaagtgctagcctcaaagaacaagctttgaactagcacatttggaacaacttatagccaaagaatcacatccatcaaaattgccaatgaaacattccacaaaagtatattactcatttctagttggaagatatctcatagtctaagtataatttatgattgtgttatctatatatcaactttaaaaccaaatttatgtagtaacttaccaaatcgtaaatattttgattacaaaaactatagatatccaaaccaagaaattaacttatacatttaaggtttctattagtattgcatgagttaggataatgaatatgtcaaattcataatttgggtatctatatcaaacatatccaaactaaaaataagacttatgcctttgaggctagcatcttgggtgcaactaatactctgcgctccttttttaattttttgcaaaaaaacacatcattcggttagaataatgtgttttagatttgatgcataattcaataaaataacgtattaattatttcttaaatttcacttttatttttttactgctaagcaataattaacattatcaaatgcttttataggatgttctggattcgcttgattatattttttaaaatactggtccgttatttcatctggtgttaaatgctcataaattaagaaatcactatcagccaatagtttttccaactctaaataagaataacttgcaagcattttttcatttgttgcattagttagtgcaatttgctttttaactctttcgcctgccttagaagtatatgtgttttcatcttgataatcaaaaaccatgctactacctttcggcacaatgcttgaaatagtattaattgcatatgcaaaatctttcttagttaaataataattcaagccaagtagactacaaaaacttattttactttgctcaaattgagaacatttaattatgtttctttcccaattcttttctgtaaagtcaatagatatatagtgtaaattcggaggtatttctttcattactttttgaatacgcttttgcttatcttcaccagttaaaggatggtcaagttcaaatatttgaatatctcttgcccagtcaggctgacgatatgcaaaggtgtcatacccagcagcaaaaatcaaatattgtttcgcaccaatttttacggcattttcaagtgatttttctgtaaatgctgctctaccaattggagttggagataactgattgtcaacgataaagcgtaacgcttcatcttgtgtaccattaaatgatgggttgaaaaatttaattccttttgacatattacttgaaatttgttcatattcattttgagttagaatatcctttgctaagtaatcatcaaaaactttctctttgtttttaacagaatgatacgctcttgaaaacgcactaatcaatgcagtcatacttttttgttccataaaattatcacctctaataattaataccaattcaccaatcaaattacaagtattgacatttttattgttttatggtattataaatatagtaaagataaacaatttacaaaaacgtcacatttatagtggcgtttttttaatgtattcatatataaaaatatttttctaaattcacaattacagctaaaattcctttaatatttttagaattattatgaagaattatttttgcaatatatttgtttaattttttctggattaattgtattatcattagactgttgaataaatactaaggagatctagtggcgtcagctttactgtgaaaaacatgaaaaaataaggtaggatataaattttacttataaaaatagagtagcttttgcactactccacaaaatgatttattttttttgatttattatttatgattaagcacttactatgattttgcttgcacttacaccagaattaactaaaatctgttttaatgtttgactctttacataaaatgtagcctttgtacaatcatagaatggattaattcctataccattaggcattttttggtgcgttgctatacttgttacactatctggaatagttatgctggttaaatttgtgcagccttcaaatgcacttctttgtatacttgttacaccatttggtattactatgcttgttaaactaccacaaccttgaaattcatcctcatttatgattgttataccatttggtattgttatgctacttaaactgctacaaccactaaatgcactatggcctatgctttttacactatccggaattgttatgtttgttaaattaatacaattccgaaatatagcatcccccatatttgttacactatttggaatggttaaagttgttaatccactacatccagcaaatgattgaggcccaatagactccacactatttggaataattatgctttttaaactcttacacccactaaaggcgtattcatttataattttcacactatctggaatagttatactttgtaaattactacatccattaaatgcatatctatctatacgttttacactacttggaatatctacgtgtgttaagttactgcaattcatacacactatagattctatccccgttgtactatctggtattgttatgcttgttaaatttttgcaggtagatatcgatgtaaatcttatacgttttacctcagtaccatcgattttatttggtatcacgactgagctatcagaaccagtatattctactattgttccagttgatttatcaaatttaaagtttccgcttgttgtaagttctgtccatgcaccgctttcatttagataatacccatcaattgttgtatctttagccatgtagcctttagaatcaaaataataccatttagaattaattagcctccagcctgtagcccatgaacttccttctgtataccaccagcctctaggatcactcttccacgctgcactcgctcctattggatttagtgctaatactgaagctacaaataatgaactcgctattacttttattaatctcaaactcttcattctttacccctcctatgtaatttatcgtatttaatggaacaatatataattataccatatttctggtaatgttttcattatttattctgcaaacaacttaaaattgatcaataaaaaacgtattttagtggtataacacataaaaaaatcgtaaattcaatctctagaataatacgattttacaatttgttatttaattttattgattcataacttatgaacaatatgtattaatctcattgccgttttttagaaataaaattatattcatattattacttaaaaatttaatcaataataatcttaataaaaagcatagaattatgcattgacaatagcgtttaggttctatacacttatagtatgatgaatttaaattttgataataaattaaaaattagttacactcttttgagattagttacaaagctttctgaacttgataaacaaactagttattatggaactgatcagcagctttttgaggcagaaattcacatgattaaggctataaaagaaagtgaaggtattcatgttattggtcttgcagagaaattgggggtgacaaaaggagcagtttcacaaataattacgaaacttcagaaaaaaggcatgaccataaaagaaattgacccgaataacttgtcaagattgataatacgattaacacctaaaggagaaattgcgtatttacaccatgagaaaatccatcaggattttgatgttcttgttaacaatattttaaatgacagctctaatgaagaaaaagcgttcttaaaaaagtttttaaacactcttgaagaaaaagtcgatactttatctgaaagaaaaaaacagtaaaaataatatattctaaatattgctaaaaagcaatattttttaaccaaagtgtatagcacttaaacacttttgattattcttttgatgagactattggtaaagtttttagtgtctttataacttataaatatttaattttaggaggaaatataaatgaatttaacatctattcgagcatttatgatcaattatagagcaaaaaaaggcagcagtgaggtaattaaaagacttgaaataaaaaaaggagatgtaatcggtgatattggttctggtggtggattttttactttcctattctcaaaaatcgtaggaacagaaggaaaagtatttgctgttgacacaaaccagaaattattagcgcatataaaagaaataattaaatgtaaccaaattcacaatatagagacactacttagtaatgaaaatgactgttcattgctcaatacacactgcaattttatttttatgaggaatgtatttcaccatataacaaaccacgttaattattttgagaatatgaaaaacaacttaaatataggaggtaaggttgtaattattgaatggcttccaggtgcaactctcataggccactgtacagacgaaatgaaaatcaaaaaaattatgaaggaagcaggttttaagcatttaaaatcctttgattttttaaagaaacagtcgtttaacatatttgaaaagtaaaaccttttactccaaatactacgatgttatcagaaaggtagaaaataataatgataattaaaaaaaataaaacagcacttataactggtgctactagtggaattggtgctgcctttgcaagaagatttgctaagataggatataacttaattattactggtagacgaaaagaaaaaataaatagtttggccaaggaacttaggaaagaattcaatatcagcgttgatgtatttattgttgaattgtctagtatggataatgtagattttttgattgaaaaaattaagagtagagatattagtgttttagttaataacgctggatttgcaacaaaaggtaagtttgcagatgaaaacttaaatgtgcaggaacaaatgattaatctgcatattatttgttcaataaaattaatacattctattttaccaaatatgattgataaaaatgatggaacaattataaatttatcatcacaaagtgcatttctagctatacctaaaaatgcaatttattctgggacaaaagcatttctaaattcattttctgagtcaatatatttagaagttaaagacagtagaataaaagtacaatctttatgtcctggtttcataataagtgattttcatgaaaaaatgggaagtccaaaagctaatcacaaaaataaaggaataattaggtggatgacaccagaaaaagttgtggatatatcattaaaacaactcgaaacaggtaaggtaatatgtaaaccaggcttttttgaaaatttaggtatgaatttattaaattttgtgcctaaaagaatatattataaaatagcaccctgtttttataaataattacactaggtaagataagtagagattaaagtttcttatccataatttctcttaatattattaattcacaacatgagttggcttgattgcgatgttgagactaaaataatagcataaatataagatatagctgaattttgtagcagcactatcttaaatttatgcacctcaatatcgcaatcaattactagaacgaagtcgctaaaagccgaccgtcccatatggagattcaaacctcatgatttacacctaaaatttatatttttattcatttattaacattttaaatctttatttcttgaaagtatatagtttcctttattttagtatataaaatccccctccccatgattaagtgcttattcacttttatctttatttagggtggcaaagtactccggggcattattttacctatctttattaaatttcccttctcacaatttttacactttcctatttttattcctgttaatttgaaaaacagctccgctgacgatagattctcaagttctttaggtttaaccctaaagatttctaaacagcgtttaaactttagttttttatttctgtttcctaaaattccataatgtcttattttcacaaatctatctggcagaacatgcatagtaaaccttctgataaattctattggttttaaagacatcactttttctttatttttgtctttataatctctccacttaaatactactttttcattatcaacttttataattctgttatctgatatagcaactctatgagtatatctacctaaatattgaagtacatactccgcacttctgaaaggtgctttactgtaaacaatccattcttttttatataaattatccttaaatgaattaaatatattccttgatgataactcactaatgtttttaggaaatttaagtttgttatctaggtaaagttcatttaagtaatatagaaattttcctctaaatattcttgataaaacttttacaggtatgaagaatttcttttttgattttacccatttagtgttatcaaagcttaatccaccaccaggaactatacaatgaatatgtggatggaacattaaattttgtccccaattatgcaatattgttgtaaaaccgatactcgcattcaagtattttttatcctttgctaattctagcaaagtctcggaaacagaagtaaaaagaatagagtacatttctttttgattaaacaatgtcaaagaatttaattgttctggtatagtaaaaacaatatgaaagtaatgagttggtaataatgctttacttctctcataaatccacatttctttggcataagcctgacattttggacaatgcctatttctacatgagttatatgaaaccttagtttcggcacactcatcgcactcatatacatggccgccaagcgcagcagttctacaatctttaattgaatatagtgcttttagaatattagatggtaatttctttggcttaatatacgcttctccatgtaaattaataatctcttgcagtgaattcataatttactcaaatgtgtctaatggactctttatattcagtatttcataatccattacatgtaaatatatagatgttgttttgatatttgaatgtcctaataatgcttgaattgttcttaaatcaactccgtcattcatcaaatgcgttgcaaaagaatgtcttaatgtatgtaccgtagcatttcttgttatacctgctttttttattgacttatccataacaagttgaattccacgaactttcattggctttttagtctgtctagaaataaaaagataatcatctggttgataatttttatatccaaatttgatccagtattctcttaatatctctaagtttttttgtgaaagcaaagtatatcgttctttattcctcttaccatttcttattctaattttcatttctttactcataatatcagctattcttagattaacaacttcgctaacgcgtaagccgccagaatatatagtcgtaagaattgctttatgttttaaataggttatggaccctaataaacgcttaatttcttcctttgttaaataactaggtaaatgcttatcatacctaagtcttgggattctcaaatcgttccaagacctttctaaagttactacataaaaaaattttagagtactattgatataatttatagttcctttgcataattttcttgtttttatgcaatactctaaataattaatgatttcaggttcacctaataattcaggtggtctgttataaaatctagaaaagtttttaataatatatacacggtttttaatcgtgtcattactacgaccacgtagttctagatctttaatcattttttcgattttttgatacattttatcactcctttaaaaggcgtgtaaaatgtgagaagtgaagttccttgagaaagaacttcacttcttattttttccatataaaattttatttaatcactaaaccaagccgtcgcttttagcgatttagttcaataatagtattgcgcaacaaaaaaaatcgtaaattccaactattgaataatgagatttacgatctgttatttaattttattgatacataatttaagaatattatgtatttattttatttaataccctctatttctgactttaatctatcgaaatattcatccataaattttaatctttcttttccaatttcttttgctttatctgtatacaatttatcggggatttttttgaattttacttcgtactcaataaaaggtgtatgttttgaaacatctttcaatcttccattttcaactgtattgcctttaagatattcatctaaggattcatttactattagtctttgtccaaattgtcctgctaacataaaagtgcgagcaattccgcttgcccctataacatcaagcttatctgaatcaaaaagtatttttgcttccattgtattaggttcatttcctgttctaaatctatgtgttataatacagtgctttattttctcgattttttcttcctcatattctaaagttcttaatatatcctccgcaatcacacttcctaaaactgcatggtcaatttctcctgttttatcttggctctcttctactcgtgcaatatcatgtaataatgcggatggaataagtatttccaaatcaatatctttttcatgttgtgcaattaataagcaaagattataaactctaaatacatggtctaagttgtgtgctgaacaagttaatttgtcttgaacaatttctataatttttttatgtttcatttcggtatccatatacattagccccctacttataaaatatttctataatatagaataccgaacaaatattcttttgtcaaattattctattttatatttacttaataacttaataatttactacatgccattttactattctgtactaattatagaatattttataaaaaccatattgctcaattttcagagagcatttcttaatttaattcacactttctacatagtacgcataaaaaaatcgcaaattcaatctcttgaataatgcgactttacaatttgttatttatttttattgattcatgatttcagaatgttatgaattaacataatcgattattttatctgatttttctttttgactttatccttaaccagccaggtaattgctataaagtaacctataataggagaaatcccgtatcccatcaatggaattgggaagttcccaaattgtgtagatatcaatataataataaaatatataccaatacacctggatattagttttgagttctttgggggaaagattataaatggcaatggtaatataactaatgatataactcctaaaacaaaccatatgattccggtattagctgcaagactaagtatttcttctacatatgatacaggtggtaatgcatctaaatacacccacgaaacaacagccattattaaaagtgctcctgcaatactaaaacgaattatattgtttctgttgttattccatataagaataatcattggaattataaatgcagttaactgcgaagcatctggctgtcttagtaaaaggaatgatacaattattgtagtaattatggtcaccctctgttttccattcaccaatcccccccataacttaataatcacaataggcaaaactatacttgccacatagaacttaattggtccaagagatatccatctatgtaccccttccattcctgaattaataagagttagaaatagtagtattactgagataaatatagtgacgctctcagtattaatacctttcattttttcttttcttgatacaacaaaagatgaaatcaatccccctattaataaacaaaaaatattttgtccaacagtaaagacagcaacattgtgcaaatacattactatcactccaataatgactggaggcgctgcaattattagtggtataaaatttaataatcttacttttttcattacaaactccttaataacaattcacttaactactgttgccccttaagtttcatggagacaatataggaatatggcatacaaacttttttcatattcctattaccctctttacaacttaatatagttagtattataaattagacattataaattttcaatttaattcgcatttatttactattacgttttatattagtattgtgaagtactatacataaaaaatatcacattatctatctattactatgataatatgatatttaaatacgttattaaattttaaacaataaataaatctttttaatcaaaaataattctattttctttccttggctgtggtttaccatttttagatatgtaaccaagagggatgatactatgacatttataagtactatctaatccccatttttccttacttttcttacctaattcagtttcaaatgttttttctcctcttgaaatacaaacagaaccaatatttatttctgctgcttcaagcataatattttgacttgcaacacaacagtcatgaattgcataaggataattatctggtgcaaataaataaattactacaggagctttataaaaagcacttttaatactatcatcatcagcaatacttccacttgatttatcgtttctcctcgcagctccgaaaagttctctatttatctttcccaattcatcatttaatctcttatcttgaactacaacaaattttaccgcttgtagatttcctgcacacggcgcccataaaccagcctctaaaattttctctaactcctctttttttatctgttcttctttaaaaaatcttatagatcttctttcttttataacttctaaaactgtcttcacataatatcagctccttcataaaactattatataacgactttttttatatgaacagtacgcacaaaaaagtctctataatcgctctttatacaaatgtccccattgcttcactgtttcgctttggtccatctattaaatctcttataattaatagtttccacttactgcccaatatctgtacagttgtggcaacatcacaaacaggcatatcttctttctttatcataaccttagcctccgtaatatctattaaataaactttcttttgtttaataaatattacaacagatttttaaatatcacatcattcagttttcaaagaacatattttatttacttcaccaaatctacaaattgctcactaaaaactcataaatccaatctaataaataatacgattttacaatttgccatttatttttattgattcatgattcaagaacaatgtgcattaactgtacttaataattaggttattttctttaatgttctttatcttctttgctatttgctctttgaataaagttctgcccatgctggaaaaaatccagcattgatagcaatattctgtgaatgaaaatgtgattgcactgttccataaaacggtattttccctcgtttcaaaatctcattttttaaaagtccaactaagtttgcaccaatacctttgcctctatacttaggtaaaacatcaataccaatttgccacatagttttgctatctgaactagcacctgccatacccattatgttatctccatcaaatgcagcaactccaagtacatctggatgttttttatcaaaaccaagtgcttcattaaatctattatcattttcaaattgcaaaagttcttcatgctcataccattttacattagtaataggttctatacataactcatttagatttggtagatagtagtgatggatatctgctatctcatgtccaaattcttgtaacttattgtcaatttcacgtagatttgaacataaaaaaaaccatgcaccatttctatctacaagtttttcttcacaccaaagcattattgtaggtgaagttcttataattgccttgccaccaaaacaaagtactttaaaaaagcatccatcattttcataaactcgtctgccatcaataagtttgttattcactattgtatttttttcttttgcaaaatcagacacttggcaattataatcaagtgctaattgctccttcgcaatttgtataatttcagtttttgtatacataattattacctcttattttttaatactcattaattcacgcttatttactaatattaacgtgagttcgatggaaaaatttaagggataaaaaatcccatcaaaatgttttattatataagtgcgaccaaataaataaaacaaaggatgggattttatgcaaaacttattagtagaaatattttatgatgtagacaatttttgtattggatttgaaaattactgtaaaagtcatttcctaacggaaaatagcgaccgcaaatttgcaatgattaaaagtaaaactttatcattaagcgaagttatgacaataactatctactttcatttgtcaaattacagaacttttaaatcatattatattgagcatgtgtctactgttctcaaaccgtattttcctaagcttgtgagctacaataggtttgttgaattaatgcaacaatcattagttgcactactattatacatgatgaaatttagaactggcaagtgcacaggaatttcttttatcgattctacaactttgaatgtatgccataatagaagaatacactctcataaggtttttaaaggaattgcagaacgtggtaaaagttcaacgggctggttttatggttttaagcttcatcttgttgttaacgataaaggggatattctctctttttatctaactccgggaaatgtagatgatagagaaattaagactatagaaatattagcaaaagatttatttggaaaactttttggtgacaaaggttatttatctaaaaagatctccgatattttgtattccaaaggtattcagcttataacaaagataaagaaaaacatgaaaaataaattaatgttaatggaggataaaattcttcttaggaaaagagctatcattgaaacaataaatgaccaactaaaaaatatatgtcagatagagcataatcgacatagaagttttactaattttgcggttaatatagtttcaggattgatttcgtatagttttcttcctaagaaaccttctcttaagttggacaagtatctaactatggaataattggaatatcgaaccacaagattacaaggatacttttttgctttttttcataaccatatttacccataaaatattctagcttttcgaactcacgttaatattaatttttatttttccatccgcatttgctccaacattttttaaactatactttccttttttaataaatattgaatcagtcaattttaaatagcttcaaccaaatataccattaaaattttatgagacaatttcaaattacccttttattgcttttaaaaattgttttctttcatcttcatttttaaataacttaaaccaatcacatatttcacatgcaaaatcaataaaagcaattccttgagatgttattaaatttttatctactacaactctttcattaacaaaagtttctcttgggaaaggatcaatttctccatattgctgtttatacatttctgtccattcaaccatagaagtagtatactttctgttttgtagaatattagactttgctaaaaaatacggtccaccacaaatagcaccaatcagctttccttgtgaattaacattttcaattaattgaatcaattctggcctaagttcactattccaaccaccaggaattattaacccatccgtagtttcttcaacaacatctttcactaacatttttggcttatattctaatccagacatactttttataatatcattgtcatatgcaatagttattatttctttgcctaaatctgttcctaaaatatgagcaataggcgtaatttcaaagtcagccatttcattatagataaatataaatatcttattttttagttttatatctttgcttcttacgaatgtatgacaaaaggaacaataaaaattattagtcttaatctttactatatttccttcagaattaacttcctctgtttcatttacaataacataaagatctttaattttcccacacttagggcacattgcattagccatattctacacctcttttaatcttttttacttctttcatttttgtatgctaaatatccttttatcaatagaaatactaggtcttacgccagaattttctattgtatatcaagtatagcacattttgtaaaaagatttttcttaaaattctatttaggtaaaaagtgtaaatatattagactgtgtaatgtcagcctcctcataaaaaagtattatataaataaattcataaagtctaaacaattcactcaactctactattattcataccaatacaatcaattaataacagctttactttcatacaaaagtcgaaaaaaataagcatagaatattctatacttatttttaaaacttttcagttaaaagttcttaattgtaggttgtttaactaatgcttgtcacaatgaaatttggagcaatcaatagttatccaacctgtaatttagtactttcagcgatattttcatagtccttagaaataacattatttctgctttctgagatttacatgtttctatgttattaagctacttttttgatagctctcaaatatttctttcctttttctgtatcatatttcccttcccacttagaaataacgataacagctaatgagtttccaattatattaacaacagttcttgccatgtcaacaatacgatctattcctgcaatgaaagctaccccttctacaggtatacctacagaaccaacggttgctaataaaacaacaaaggatgctcctggaactccagccataccttttgatgtaaccattagtacaaatactaaatttatttgcgtagcaattggcagatttatcccatatatttgcgcgataaaaagtgctgcaatcgcctgatataaagtagacccatctaagttaaatgaatacccagttggaataacaaaagatgtaatagctttcggacagccatacttttccatcttctccataagttttggtaaaactgcttcagaacttgctgtagtgtacgcaagaataatttcatcttttaaaatcttcataagtgatataatgcttgaaccacatatcttccctatcaagccaaatataacaaatataaagaaaatcatagctacataaacactaataactaatttacctaatggaatcaatgaagctactccaaatttagaaactgttacaccaattaatccaaatactccaagtggtgcaagtttcataatttgattagttacccaaaacattgaatcagccacaccttgacaaaaagcaagaacaggctttcctttttctccaattgcagcaacacctaaaccaaacataactgaaaagaatataactgcaagtaaatcaccttttgaaagagattcaaagatatttgttggaacaatatttaaaaatgtatctgcaaaaccatggctagatacagtttcagctgtattcatatatttttcgatactaactgacgaaagttgttgaatattaattccacttcctggatgagctacattggccacaactagtcctattacaatggcaactgtagttactatttcaaaatacagtatggtttttcctcctatttttcctacctgcttaatatcacctacaccagcaacaccaacaacaagtgatgaaaatactataggaacaactatcatttttattagtctgatgaatatatctccaataggctgtaagtatgatgctacaactggattgccataaaaagcagctcctattgcaatacctagcacaagccctagaagaatttgaaatgctaatcctaattttttcattttaatatcccccttctaaaatgctgcaacttagaattttctcgtttcaaaaacttactacagagaatatatttgataaaaccttataagtatttaaaaagacaaaattccaaatttaaacataatcaataaaaaaacaatagattttcatttaaaaaataatgttattttactaaatttcttattgcttttataatcaagtgttgacataatgtctcacttttgaaaatttatacaagaaaattcaatttccgcatgtattataacacaaaaaatcatttattcctatgtttttaaaattctgaataatcagaaaaatccattttaagcctatcaaaatattcgttagtgcgacttttataaattaaatttattagaattttaactcaaataatatacgttaatccctctattctagtgccttaagcgcatattacaatattctttcttgtaatatagcatctatttcaaacatccttatatgaattagaaaaaaatttttcatgtcaattaattaatatggagtttactatgtgccaagaacataaaaataaggagtgatatgagattaaaattatgaatctcatatcactccaaatgacttctcttgctatttaattttaagcttacttacaaaatttattaaactgtttttaattcattgctaatagatttctttcctgatatccctggctctgtcatattaaatggatctaaaatttcatttagttcatcttcacttaaaagtcctgcttctaatatcaaagttctaatagatgtccctgtttttatagcttctttagctaggtttgcagctgttgaatatcctacatgtgggcaaattgctgtaattattccaacgctgttttctactaaatcacggcatctttcttcattggctgtaataccttttacacaattatctatgaaagtttgaactgcataagttagagtatcaattgattgaaataaacaatagaatataattggttcaaatgcattaagttctaattgtccaccttctgctgccattgtgattgtcgtatcattaccgataatattgaatgccacttggtttactacctcaggaataactgggttaacttttcctggcatgatagaggaaccattttgttttgctggaagattaatttctccaaatcctgttcttggtccagaagacattaatcttaaatcattagcaatcttagataatgttactgcacaagccttaacagctcctgatactgctacaaaggaatccaagttttgtgttgaatctattaaatcaaaagcttgtataagctccattccagtaatctctgatagatttggaacaactcgtttaagatactttacgtctgcattaactccagtacctattgcagttccacccatattaagaactcgcatctcatccatagctttttccatacggttaacatctctcattatagctactgaataagctttaaattcttgacctaaacgaattggtactgcatcctgcatttgagttcttcccatttttattatgtgatcaaattctatagctttttgtgaaaatgcatcatgtaatctatatagctcactttgagcatgttccaataattttaaagcagtaattttccctgcagttggtataacatcattagtggattgtccacagtttacatgatcatttggatgtacaatagaatattctccttttttacctccaagtatctcaattgcacggttggctatgacctcattagcattcatattaagtgaagttcctgctccaccttgaattgggtcaacaataaagtattcatgcagatttcctcttaatatctcatcacaagcttttacaattgcatctgcaatctttttgtctaaaactccaacttcacaatttgttatagcagctgctttctttatatatgctaaactatttataatttctggatgcatgaacaatccagtaatcctaaagttttcagcagcacgcaaagattgtacaccataatatacatcttcaggtatatccttgcttccaattgagtcgttctccttacggaaattgatatctttattttctaactttatttcccttatcataaccttcgcccccacattataatcggcacttcttgtataaattattggtttattatcaaattcttctaaattcatctgttgacttcattataagtgtcctctacaatataatcaaatacatataatgatataagtattatagatttttatttatatgtggaggttatttatgtttaaaggtatggaatatgtgtatgaagttaataaggaaaaaagtttttcaaaagccgctcaaaacctgtatatttctcagccttcccttagtgcaactataaaaaagatagaagagcgtgtaggttttcctttgtttgaccgaagtacaaatccaattcaattaactccttgtggacaggagtatgtaaaatgtatagaaaagattcttgatattcaaaatggattcgagaatttcttaagcaatatgaacgagttacgtactggaaatatagctataggcggaagtaatctttttgcatcttatattcttcctcctataatcacagattttagagaaaaattcccacttgtttctattcatatggttgaagctaatactgcgcttttagagcagcaactcttctctggtgctttagatcttgttatagataattatgagtttaacgaaaatatatattctagacataagtactgtaatgaaaacttgcttttagctgttccaaagaaatttgaagttaatagtaaaaccataaattatcaattaactgctaatgacataataaataataaacatcttgattcatctacacctagtgttcctttggaactatttaaagatgaaccatttctatttttaagatctggaaatgatacacgtaaacgtgctgagaagatatgtcaacatcataacttttcaccaaatgtgattttaaaattagaccagttagttacgtcatataaccttacctgctatggaatgggcatcagctttttaagtgatacccttataagatatacaaaacctgaccctaacgtaatctattataagctgaatgaggatagcatttgccgtaacgtatatttctacaccaaaaagggaaaatacttcacacgagcaatggaagagttcttaaaaatggctatacctaaagcgaatgaagatataacttaaaattatatgataaattatcgaaaggacaggtgctctgttgtttctgatatagcatatgtttatgtggtaacttacccaaagcagaaacattgttatttctaagagctatgaaaatttcgctggaagtgctaaattgtaggttgcatcactaatgcttgctcccaagataagcccgtgataagcaaaattgaataacttttgattaagaaattcctacaacatattctctaatataacacttcaaaaaagagtacctatcctttctgatatagcatatattttaatccataaatataattcttagattggatatctatatctggtagttcactcaaaaagcttttagaaaatgaaaacaccaacttttcttaaatcgaaatgttggtatttttatttttggctacgttttatgatgttgaaatatagcacacaaaaattatgggtaagattttccacctacaattctcaatataagaaaattgcaaattgatattattaaattatctttttacattagtcaatttctttttataaactcttcaacctcattatatgattcaatgtctgcaccattatcttcaatcatttttataaattccttttgtatttccactgccctctctttaaatttattcaaattctttgaattataataacccattaaattgaattcatccaagccattttccattacagccatgcttaatgctcgttgaaggcttacacctgaaatatatgcaagaatagtatctccactatcacaacatgtatagattttattccaagtcgagataatttcttggtaaagttccgcaagatctttataatttgctttcttatcttctttatttccttttccagctttactattcaaaaagtctcttgtattttttatcattttgtaacaatattctttaagttgccttgctgaattagcctttgtaactgattcatacattaaaatgaagtcctttggaatggtctctatattttttaaatcctctatttgtttctttacgcccctactaaaatacgtttggtttgcatatgctacaatatctgataaaagcatgattatacggccagcaatcgttctcaattcacagatactgtcttcaaacatcatggttctataaatatccattactctttccatcttcttcaatgctttattcatcataaacactttgtcacttaaatttttccttaacctacattgtaattcctcaaatcttgttttatcatcatctgaattacaatagagtatcttcacattagctagacatgatgtcaaaacttcattaaattccgcaattcctttaatacgttcccatgacataggaaataaatcaaacccaacaccttcaacaataaaagttttagtcaattcatatgcatgctctgtctttggtataaaatataaatccacatctgaaagcggattatcagtgtcattctcataagaaccatatagtagtaaaaggcttacatcatctttatactctctttctattttttaattgcccattctataatcatatcatttcttttattcataaagcactcccttctcaaagcttaaaagcacataatcatgaaactataaaataaacttttatacatagcataagaaaattcatcatccatgccctttttcaaaatccaaaagtattttctttcacatttggtaacaagctataaattgattttcctattttctcctcaaaatactctttaatcttaaaagtagatttccacctaggaattgtatattcattactccctcctcttaatgctatatctacaattcttttctctattaaaacgaatccgtttggtaatgataaataatcacataattttattaatctatcataatccgattcctctatgcgtgacaaataatcttttgcaaaattatattcttcaacagtaccatcccattttcctacaataacaacttcatcattatgcctaaatgatgtatggcttaaacaaattcttgctactaaatcataacccttactaattgcatatttatatccatctatgccgtgtctcatagcatgtataccttctcttcttcctatatcatgcaacattcctaaaatatatgctacttcagaatttaaattttctgtttgttccgctattaattttgccccttctgccacatacatagaatgcattacccaaggacctggatttaactcttccgcttcttttaaaattaattttgcttcttctaatgaaggtacatcttcttttttatagtgatattgcatacttaaatctccttttagaacttttacaataattcatatatgaattcttcttcctccaaaagctgaaattgttcttgttcctgcaatataccttccaccttgtagcgttccttttggaacaaatatttcgtcacctggatttaatacaatttctttcccatcaataattgctgtgtactgaccgcatacaacaacggtatattcatcaaattcatgcttatgttctttagaaactctatctgaatagcatgtccagaaagccatttggctaccgtcttcaccttcaaaataataaccatcaatgtcctctgtattttgttgactgcgactgatatgatttttttcatttttcataaactccgggaaatccttcatgcttaatacctcctattttctatataagaatatttattatatggcacttgataatttactagtatccattagatcatagtttcatataaaacttattataacattaattacaaaatattacacacaccatacatacatcgattctctatttttaagtctttccttctgatatatgagttcactacattactttgaactataaagttttcagcctttattatctttttatctttatcaaatatttgaagccattttaaccacactcccaacgcccatatatgcttttttatatctcctaaaattttgtacctaaaaaacgatgtagacattctaatatgtaagcgtcaaagaatcgacgcgtagcgatagcgcaatttaagtgataaaatatacccaacagaaaagtttaaattctctgttaggtatatttttatatgtaaattaattatttggtagtcttgacacgcagttgatctggaatgttttccgaccatggcatacatttttctagtatgtccatttctttaatttccgaacttgctaacacttcaaataaatatactaaatacttttcagttgctaagccattggctttagccgtttcaataatactataaagaagtgcgcttgacgatgcgccttttgaagtcttggaaaacatccaattttttctaccaattacaaatggctttatagctctttcggctgcattattatcaatttcaagacatccgttcgttaagaaagttctcatatatggcaataacttttgcgcatatgcaagagctttacctaaaggacttttaggaagagcatcaacaatttcactatctacatattcttgaaattttttaaggataggggcagatttcttgagtcttattatatgtctatcagtataataatcatcactccccatgtattgttcccttagctctttttcaatttcataaagttgctcacaataattaaacccttctaatgcatgtgattgctttaaagcttcagggcttaatgatgatattatttcaaagaattttcttcgaatatgagccatgcaatataatctttttatatttttaaccttattatagccatcatatccatctgtttgaagatagcctgagaatccttcaagaaattcttctgcacaagatccagatcttgttttttgataatcatatagaattactggattttcaatgcctccggagcgatataaccacatgaatctttttgagttagaatcttttccgttttcttcaataaccttcagatatgtttcatcggcatgtatataatttctttttaagagctcctctttcatatagttaaaaacaggcttaagctcagttgcacaacttattatccaattagataatgtctgtcttgaaagattaacatccatcatcttaaaatatgattccattctatataacggcattgcatattgatatttcatgctcacaacatgagctaataattcatttgaagccatacttttatataagaatgtatttggtatttttgctgaaattatattgactttatctgcatccgcttcgcaatttttgcatgcatatgtatatgaaatatgttcctctatgtaaagttctgctggcttatactttaaaatctcttttgattttttgcctattacaactaaattatttccgcatttatcgcaaactgcttcggaatcattaattttatgctcaattatgactctatctaggccggataagttatcttttttccctgaatgagaagatgatttctttcttttatatgtaatttcttcaatggtaggttcctctatttttagatcactgtttttttcagcatcattaaaaagagatatctgtcttgaatcaacttgctcactagattgtccaaaaatttttctgtttttattaagaagttgtcctttaagaaaagctaattccttttttaaattatcaatttctttatcttttgattgaatttgttcttccattttagaaatcaataattttgttttttcatcgagctgattctctaaatctaaaatatccatttttatacctcacaacaaatataggcatatattaccacaaagcccttaattccgaaacttgtaaaagttcaaaattaagggcttatagcaatatttgctttaaaagctgtttcttacttcaattggcttaaatttagacttagttctaacttcatatcccataagcagccatttcaattcttctttgttaatcttaagagcttcgtctggagtcatcggccatttcaatttactattttcaagtcgaaaataatatagccagaatccttcatcaaagtggaggattttaattctattcatttgcctattacaaaaaacaaacaaggctttttcaaacggatccagctttagctgcgtttgcacgataactactagtccattaatgctttttcgcaaatctgttataccacatgcaagataaactgtattaactttattaagattgaacatttgtaatcagatccttaagtaaattacttaaaatagctatttcattagccggtacatgtactttagctacacctatttctattattatattaggtctatcagcttgaactacagtaatctcagttcttactcttttttctttcatagaaattgcatgaaactgtaaattattattttcattattaagcttctttttatagtaatagaattgacttttagtaatgtgatttgaattgcagaaatttcctaacgttccttcgtaagaagaaaagccagcaactatttctctccaatttatattttcattattattcatataaataaacctccattgttaaaatctatgctaattttaacaatggaggattgcattttctatccgttaatttttggtactgtataagtgtaagtgtaaaaccagatatatatggttagcatttgcacttattttatttataattgagggagtaattggtctgacgtcgttaattttggattaataacatccgtcgtaaaaactgtcaaccatcccttattataaatattcgattaagcaggttggtgcgacttgttgctagacaaaggtaagcgtgggtttactacaaaactagcctagttaaaatactttaactagaactgttattacgaaaggtagaatgattgggtaacgccttgaaatgcctttccaaagtacgaatagcatttaattaagtaaataattatttgttataagctcgttaaaaggcttaagagccaccgtaagtgaatatttatattcacacgaaatgcgaaccagaggtggtcgagtggtgatagagcttgggtctataaaatatctatggttaggatgttccagcgggaactgacgaaattgggaatgtacgggtctaaactttgaatatttagaaatgaatataacacattcgtgtcgtaagtgtggattagtaaaactcgcctgtatgaaaatccatatagtgttacgggcactatcaagcttacaggctcataccaatgacctaaagatatatgtaaagatagtaataacggaacaaggaaagcttggaatatggaggttttactgcctatgaagtagtgataaggaaaatgtaaaaacatacaacttatcttaatccaagtgagagcggtggcatgaagctatgataattactgtaatagtaatttaagcaatagccactagacaattgttatttgataattaaatactgaataattcaaggttcgggtaagactaagagatatgaaacttactttgtatttctacaaaggaggaagtagtagacttgaaggaacgcatacaattagagaaaagacaactactaagaaataacgaatattacgctatgcaaagcgcgtttgacgaactttataaacaatcgtgtagtaattataaatttagaaatctaatgcaacatataatttctgataacaatatcttattagcatacagaaatattaagcgaaataaaggctcaactaccgttgggacggataaacttgatataactcactttgaagatatggaaacaagtaaatttattgaatatatacaaagaaaatttgctaactatactcctaaaagtgttcgaagagttgaaattcccaagcaaaatggtaagttaagaccacttggaattccttgcattgatgatagaatcattcaacaatgtattaagcaagtactagaaccaatatgcgaagctaaattccataaatatagttatggctttagaccaaacaggtcaactgaacatgctatagctagaagtatgcagctaataaattttgctaaattacattatgtcgtagatattgatataaaagggttctttgataatgtaaatcatagcaaacttaaaaagcaattatggaatttgggagtgcatgataaaaatttgattagtatattggataaaattctaaaatctgaaattgaaggtataggtatcccaactaaaggtactccccagggtggtataataagtcctttactatctaatgttgtccttaacgaattagattggtggataagctcccaatgggaaactttcaaatctaggcgtacttatagcaataaaagcaaaaagcatagagtccttaaaaacaccaatctcaaagaagtatggttagtaagatatgctgatgattttaaacttttctgcagagattataaaactgcacagaaaatatataatgctacaagattatggttaaaagagagattagatttagaaataagtcctgataaatctaaaataactaatcttagaaagaattatactgaattcttaggctttaaactaactgttaaacctaaaagaggtaagtatgtttgtcaaagtcgaatatgcgataaagcaataaagtctatcattaataatatgaaaaatcaaattaaagtaattcaaaaatcaagaaacggcaaagaagtttcaagactgaattctataatattaggtagccataattattatagcattgctacttatgtaaatatagattttaatagaattaatttcttagttacaaaaaccttggaaatacgattaaggaatataataaccagtaagcctaattttactgaaacctatatgcgtttatatggtaattataatggcaaagtacggaccgtttgcaacgtgtcggtcttccctatttatggttgtaaaactaaaccacctatgaattttagccaagatatatgcaactatactgagcaaggtagaattgcgattcacagtaaactcagaggatactctcacctaattaagtaccttttgaaaactgtaaataacagtaaaactgctgaattcaacgataatcgaatatctcttattgtaggacaaaaaggaaaatgctacataactggtttagatttagaaactgacaatatggaatgccatcataaaatactaaaaagtgaaggcggaactgataagtatgaaaatcttgtttggctatgtagcaaagctcataagttagtacatgctatagaacaagatgttattgataaatatctaggtttattgtcccttgataaaaaagggttaaaacgtgttaattctttaagaatgttagtaggaaattcagttatttaataaaaagataattattgttggagcgccgtatgagctggaaactctcacgtacggtgcgaaggaggggaaaaggtagcgattacttcaaagccttacctattcctataaaccctagaggctttcgtgtaactaaccaaaatgaattgtaataagtgcagatggagacaattacaaaaataaatttggaggttacttatgataagtgttggaattgatgtgtcaaaagaaaaaagtacagtgtgtattttaaaaccatacggagagatcgttagatctccatatgagattactcatacagaaagtcaaatgtcagaattagtatcaatgataaaatgtcttgatgatgaagtaagagttgtaatggaagctacgggaagttatcacctaccagtgcttagttttcttgaagaatatggaatttttgtagctgttattaatccgttagtgatgaaaaaatatgcaagtataattctcagaaaaggaaaaacggataaactggattctataaaaattgctaattatggtttggataactggtttcatttgattaactataaatctagtgatgaaatttacgtgcagttacgtcttcttggaagacagtacgctcactatataaaactccgaatagaaagcaaactatctttaactacaatgcttgattatacaatgccaggaattaagactatgctgaaaaaccgctcagataaaccagaaaaagacaagttgaatgattttgttgaagaatactggcattatgataacattacgaaaaaaactgagaaacagtttattaactgttataaaaattgggcaaaaaagaagggatatcaacaaagcgaagcgaaagccataaagatatatgacttagctcagcaaggaatccctaccttatcttccgatactccatcgaccaaaatgttagtattagaagcggttcgagttcttcgcgaaatagacaaaactcttgcattgattttatcacaaatgcaggaattagcaaagtcgttaaaggagtatatagttgttcgtgaaatgggcggagtaggtgacattatagcacccagacttatagctgagataggagatattagaagatttcatagtggaaaagctttgatagcgtatgcaggcattgatgcgccaccgtatcaatcagggcagtttacgggaacccgaaggcgaatatctaagcgaggttcttcaacactaagaaaaactggatttgaaataatgaaatgtttaaaaagtattaagcccgagaacaatgctgtctatttatttatgttaaagaaggaagcagaaggaaaagcttcaaaagtggctaaaatagctggattaaataagtttttaagaatatattatgcaagagtaagcgaagtatataaataatatataacttagaaaattgaggcttggaccagaaaaaaacatctggtctaatttgcatgcaataaaataaaaaacaatcaaaaaatctgctataaaagcattgacttttattagcaggtttttacgcttactctaatataagctatcaggccaaaataaaaataccaacatttcaatttaagaaatgttggtatttttattttggctgtattttaatgtgatgttaaaatatatactaaaaaattatatatgagattgtccactataatactaaatataagaaaattgtgaacttgtatcttttattttattataatgactatgacctttattaaatcattttcctttggacaataatattttatcaagaattatattaactggtacgtatattagcaaccataatcccaaatcaattaataattttaaatttaatattccttcagaaaaattataatgaaatcctgttaagttataaataatgtgagtaattataaacgttagtataactgtcaatatattcacataattttttctactcatttaatttcctcctataattcgctctatttactatgttacataaaaatttactgttacgtcttataacaaaattggtactgcttattttttattgccgcagatatgtataccagtcaatatcgatactaaagttcctcccaaaattgcatatccccaaatatgcatttctattttggtaattcctaaaataacgccagaaattgcaccaaatgcaatagtaaataaaattgatttccctaatctatgttctaagatcataaagattcgcctctaaactatatatgttcgtaattatttatactagtgcaatacccataaattctaagtattacatcattacgtactattataacatattttgtaaacatcgtattattcaattttcagagaacattatattaattaactgctacgtacttttttagtattgcgcagtaaaaaaatcgcaatttcaatatcttgaataatgcgactttacagttttttatttaattttattgattcataacataagaatattatgagttactgcaatccgatttcaactttattagaacgtatagttccacacgctcctaatgatgaactaatttgcgtttctatataatcgtctactttaataaactgaatatctaaaataatacttgcacatccataaatttctccttctaaataataatcattaacaccacaaaacatgagtttgactttaggatatgaactcataccagttggaggattttctatatcaataataaatgttattccttcgtttgaaatctctattttattaataacatcatcgtgaaatgatgggaaatatccaaaatcactttctattttttcatgtccaataataaatgacttatccattatctatctcctttgaatattagatttctttactctatcttgacattcatttagttagtctaaatttactatcacgaatcaattataacatattttgtaaaagtcccattattcaattttcaaagaacatttatataatttactacgtcaaatctacaaattgcgcactaaaaaatcgtaaattcaatctcttgaataatacgattttacaatttgctattcatttttattgattcatgatataagaatatgattcactggcgtcagtattcagcctcttacatttctcatttttgattttatattttaatcaataaattcaaacaagtcttcaactcttgtattgaatactcttgctatatccattgctaattttaaagaagggttatattttccgttttctaaatgaactattgtttctcttctaacccctactaattttgcaagttcattttgatttattgatattttctctctatattcttttatccttgtgtttaaagtcaccacttatttatatatcccctttctatcataatatataaataataacaatctaatcacagttgctattagtagtatgaatagtaaatatatccctattgtaacctttgaaattataaagctattatacggagttacaaggaaaacactaaaaatgccaattgcaaatattaaaaaatatacaactaacctgtttattttagataatattgaaatcaccagttcatcagttattccgtataatcttttactgtataaaaatattatacaccatatagcaatccaaataaaagttaataaaatcgagatattggtatctgaattctttagtaatatactaagaaataagtacagcactgttattacttccataataagccttagtttagtattcatttttacactcataaaacaaacctcctaatagtgatatatttataacttctatgttataaatatatcacttttggaaagcttttacaataaaaaagaacaaaaactattgaattttctataatattaaaactaaaattttactaaaacaataagtttgataaaacagtttatcttaaattcatcttttattcatcaattggcaataatttaccagtgcgaatcaattatatcagaaattgtaagtatcatattgttaaattttcaaagaactttattttaattattgcacactttaagaatatggtgtaaaacaaatcattttatgttattatgataaaactttctcaatatcacttaatattgctttatcaacaggggcattgatatctacaggaagattatcaacatcaaaccatttaagttgggttacctcattattatcctgttttaattccccttcatattcatcacatagaaaaatcacattaatataatatacttcgtcaccatttggatatactgtatgcatatcttctcctgaaaaaaccttataaaatttcaattcgattggatttatacctatttcttcattcaattcacgtttaactgtttcctctactgtttctcctaattctagaactcctccatgtattgcccatttaccgctgtctgctcttctctgtaatagtatttttctatttttatagattatagctcctgctgctacaagaagtaatggtgaattaccaatatgctttcttaatctttttatgtattcatccatatatttttacactacccttaacaattctttagatatctaattcataatgctcttcagtttcgaaataactaaaagataattttgaatttatttaattctctctgaaagctactgcatcaacctgaaagtcaattccatctctaataaactttgtttcatatgcctttcttgctggatattttccttcaaatctctccttaattatttctcctaaaaacgataaatctttaatatctctaaataagcaatccatttgcactacagatttcaatgtcaagcctatcttttcaagtctttcactcaaaacatcaaatgcaccatttatttgattttctattgattgtccctcattcctcatgcaatagctgatataaacatgatttcctgcctcaacaaccgcagagtgcgcccattcttcatctatttctgttcttataatttctctcatttaacattctcctcatattttattttcattacaaattcctatttatcttttagttaaacaaacactattgctccccataaatttactattatattttataagaagattgttcactaataatttgtcatatcatcccccgcatttttcattaattctaataagtttttggttatacgctcttttaactcaccatatttttcttctgagtattcatattgttcactatatctctattcttttggataaaaataagatggtctgagcttattctcatcaggttcccaatcataacgtgcttcaatatgtgcatgtaaatagtggtctaaattcatcttcgcatttagttgctattatgcataaaaaatcgtaaattcaatttcttgaataatacgactttacaatttgttatttacttttattaatccatgatataagaaaattgtatgttaactatgcaatttaaactaaaataattaggatttctcgctaaatatctaactaacatctgtgttaactataagaaaagagagcattatataatgttacaacttggcatattataaaaattaatgctattttttttgataaatttatgttttgatccattgtcaaatcaaatgacctaaatagattcctattaacttttgaaaatagaaagtaaactaaaatcaatgaagaaccaattcctaatattaaaaccaaaatatgtggtataccataagttacaatattagcaacatctcctcgtaagaatagattacggattacaaaatagttaaagaattcatttatgttccaaaataaaaatgagtacagaacaaaataaataaatttgttcaactttttataaaaagctattaacaaaataattagacttatagcaaaaataaaattaacaatcagcccagcagatgatattaatactgctttatattttattaattttgataccttatcataatcaacattttcacttgtcccaagcataaaaatttttgtactataagtaatatcaaatggattatttttaattttaaaaagataagcagctatagaatgacccatttcatgtaatattgtagttatacatagagttatatatgcagtcacatatataataattctttttttaaatctttccatctctcccccttaataatttattaaataataaaaaacactaaatacatctagtttcatctttaattataaaaaatacttaatttaaatagagtggttaaatgaaaaactaacttccgttttagcgtgagctattgtaactgcaagggtaaagtcagtttttagaactaaatttagtagtaaaaagacttaaaataagctataattttcataatataatatttttttagggtttataagcaggcttaataagcctacggaaatcgccttgcaaaactaacttccgtttgcttcaactttgcatgattaagttccgctgatacttgccctaaatttttgatatattatttattaaatagtgcaggttttagatgtacctcatctgcatggatatgttttaatgataacttgtctaacattgagacatctaacaacatttgggctagtttgaatggtgtatttccgtttaaactagctcttgctgtactattaatatggttcatcattaaggtaatatcctcttgattcctatcatcaaaagattttcctttgggtattatataccttatgtattcatgatttttttctacgtgcggcttctgataagaagccatagggttacagtagaatattttagttctttgatttccttcagtatctaattctaaagcttctgggtttttaaattctgagccgttatctgttagaataacaggaaagctatgtttaaatacttcatggcctaaaacctcatatagcttgtctaaggtgtctttaacagccgtctggctacagttatctataatgaaagctagcattaatgaacagtttctaaacataaaagtgagaagcactttgccacttcgtgtgccgtgtacagtatccatctctattattggaatactaggattatcctcaataaacttaacaaagtcattgaaggttcttccaactctatcagttgattctttaattacaggaagtgtagatttctttctaggtttatatttcacttttctaggcaaatcaatgtttctagctgcaaaagcatttttatcaaaataataatataaagttctttcacagcaatttagctcatctttatgatgagtaaaaatatgagatattgactgtcctttcaaaataagtggtgaaattaattcatctatcttttttagctcattcgaagttatattaagtccttctctagatgtgactaatagttccttatactttgtatctgcaactttagctttataatagctcttttcatcggtgcacgtagtgactgtactgcaactgttgcagacgtatgggtagcggttaagtttagtgcacttcttgattaaatattcattacaggtcctataacagtttataaacctacatttcttacattgattgccacagctactattacacaagtttgtctttgtgcaactttttcggtgcttgcatgattgtagattattttcttttcgtttacttgatttgagaaatctattccgcttgatctctttagagatagtagttgggtccttcttaactctttcagcaatttcctttaatgtgtaattttcatctagcccgtattcaattataagtcgatcttctatcttaaggtgttttcctttgcataaatcttcatttgacataattaatcctcctaatatgctaaggacaaatatcattttaattatatcaaactctttgtataactaatttccgtttgacttagaaaacggaagttactttttcaatttacgtaatttaaatagagtccataaagtcatctacattctattacatttattataataatttactattttacattaattatagcatatttgtaaaaataacattgtccaattttcaaatagcatttttataatttatcacgttaaatctaaatattgcacaaacatataatccagcttatttaaaataatatcggggaatcacattaaatactacaaatagtatcatcaatataccaaatgaaattgaaagtatttttaagtctttatcttttgatattagtccattaaataattgctgacacccaaagcaggtatacattattggaaagacaactttatcagtaacgaaccccatcaaaaaacctattggaaatataagccctacaactaaaagcaatacttgtactaatttaatttttccattattaatctaaatcaccgcctctaattaatcatttatattcttttaattcgtctaatgcaactaataattaattattttttatacagatacagtgttccatttttagctattggtctattgggtatattttgtcccacgaatccccttcttttaagttctctttcaattactttcataaagaaaccatgacaaacaactaatatattagtatctaattctgtatctagactattaagaaagtcatttattcgcttctcagtatcttttctagtttccgcttgagatttatgatgaaaattccacgctattcttgctgctatacaccaaaatctatgaggaagttttaatttagtttcacatataggtgacaaagggacctctctcaatagttgagtttttattatttcaccttcaaaaatcgtttgagcagttttgattgctcttggtaaatcgctttaaaaacacttgtcccattttattttttgtgtttcaaatttattttcaattacaccactatcatcatattttattacccattttttaaaatcattcgatgccataaatacctgcgcatcacaatcaactttaaaatgtctgactaatccaatgtacattatttcctccttttaattttggtattaaacaaaattctttttaactgattttaatagattaatttgtaaatacttaaatttatgatttatgtaaaaaattcacactaactgaactaacatgatgtatgatttgttaaatcagaaaaatcaatacttgtcttatttcaattcaaacacaatcatttaagacaaccacaactacaatcaacagctatttgactatgatactttaacggaagattgtgaatgcctctatcacttctgtgttgcaattaaagtctttaagtataagttcaattcctaaaaattcattttcattataatcaacattgcatagctcttctctcttactgtatgtattagtcatttcattaaataatattgttaccatttcatcagtctgctgaatatttatgtttcctatactctttaccttaggaataatgaactcaccacagcacttgctttcattaaaaacatttatacctatccagttgttatctttatcaaataatagttcgcacagagtatcctgaattgttttgattttaacattagactcttttaatttaatatatattagagaaaggttacttaatttttcaaatgttattttcataaaaatattcttctcctaacgttaattaatactaatttactattacgttttatactagagttgcacataaaaaaatcgtaaattcaatttcttttgaataatacgattttacaacttgctatttatttttattgattcataatttttgaaaaatgtgcattattaaaaatacaactttgtattcaattattgtttcttgtactgttgtatttatcttcattccttttccatattctaaataaacatattatatatacaataaaaagaattataaatacatcagaattctctattagtctatgtaattctttacctcgaactaaaaaaattaagattgccactatccaatacactatacaatatattgcactattgattagaataaattttaattttcccttttctctttttttagaccaccgtcgaataaacttttcagtatttctcaaatcaatccctccaataaccatattagactagtcacaatctacagttatatatctttaaaattatttaagacatcataattcactattacgaatgaattatagcatattttgtaaaaatttcattatttaattttcaaagaacattttataatttactacgtcaaatctacatatgacatagcttgtattaataatccatttggtatattttactctttagatataaatttttctaataccttcatagcaaatctcgcatttggataggtaatagaaccaccaccaattacaccaatctttattgcttccataatctcctgcatactagctccagtatccatacagccctcaatatgataacaaatacactcattacaacgactaactacggaaattgctaatcccataagttctttgtgctttttatctattgcaccagcagaatatgttttatcatccaattctccaaattccttaaagaagtcatctgtctgaataagtttcagattatactcttttcgatactctttcatctcttcaatattcaccattatcccccctattatatggatgaagtttacttcatcataatttactattattcatcaggaagttttatacagcacttattataacattatttacaaaatattacacgtacaatgcatatatatgctttatatctttaagtcatttgaaccacactaccaatccccatatattttctgataactcctaaaattttgtacttccaatcaaataatttagatatgctcatgccaacatcaggaccaaaataaaaacaccaacctttcccaaattgaaatgttggtattttaatgagataatatttaaactattttcgtattcagtaattttcactctctcctttatagatcattgtttctaactttaattgcagttatgccatatttaaaataattttttaaaaaacttagcaattccattagtaatgatacctatgaattgtgctaaccttccaaaaatcatcccaattattatcataatcaatacaaatactacacctacgactatttccattcaaatgcccctcttctacaactttttatctaatcattcatatttttagaaaatggatcatagctactattttcattccatgaatattcaatactttgactaatctctaatgctttttcttttcctattaagtcttctatcaaacccaatgccatatcaattcctgcggatactccagaagatgtatatatgttaccatcccttacccatcttgcttcttttacccatagtacatcttcattttgttctgtaacccatttaaatgctcttttatttgatgttgctctttttccatttaaaattcctgcttttgcaagtaaagctgaacctgtgcatacactaattatgtattttgattctttggacatattttcaatgaagtttataaaatcatcatcattaactttttctcttgtgccacttccacctggtacaaataaaattttcaaaatatcattgtctcttgtgtataaatcagtatcaactctcactttttgagaactttcaataataccgccatcagccgatatgaaattcaatttaaaaatatccggtaatcgtccaaatatttcaacaggaccaaatacatccaatgtttcaaattcatcaaataaaagtatatctactctataattcatgttatcaactcccaattttatagtttgagaaacaactcacatcattaagtatccttagattctaaaattcactcacaactaaagtatattaattctttacaggttaattaatttgatataaattcatctttcaaaattgaataatacaatctgtctatatattctccattttggtaaaagaaatctcgtaatgttccttcataaacgaatccacatttctcgataactttgcgagatggtatatttattgatttgtggcatatttgaactttatgcaaattcattttatcaaaaccatattgaataacagcctttgtcgcttctgttgcaaatccttttctttgaaaaagacttccaatgcaatattcaatttctgcaaagttattattgttatctactaaaaaataagcaatttgacctatacattcatttgtttcttttaatataacagcccatctatagtaatcacttttatcataggaacctatatatttatcaagtagttctttaacctcttgctttgtactataaactggttctgaatatagtgattgaatctcaggatcactaatccaatatttgagcatattttcatcatctgtatattcaaactttcttaaaattaatctttctgtttcaattccaatagtcccaacatgtgttagcatagttttaatcctctcattcataataatttactgtttcgttttatgatgaagttaacaatgtttattttttattgctacatttatgtataccaatcaatattgatactaaaattccacctaaaattaattatttctaaataccttatctatattctccctatcatgatctagtatccattcattataattcttataaagtggataaattgtttctctcttttcagatacaatgtctaatcccctatcatcataatagtgaaatagtacattcaaattcgtatcaaataaaaatatagctgatacgagttctgaaaatccgccgatgtcagctttacttatctcttctaaaagtctatttatatttataacatttgttctcaaatcccaataataagatatcttttctattctctcatcactatcatcatctaaataaaccatttcagaatacttttcctgaggtaaaggtaattctgttatttccataaaatttttaagaaaatttctaccatactcattgtactcattcggatatattgtccaaagaagagtatcaaatttacatggcaggccctcatatatagtcagaacctttttaaaagtttcttgtagatatttaggacttaactctccattacaatatacgtcaccccatggttcacttatttcaaaccttattcctataggactgttataaaaaatgggattttcaagtcttttcattcctagtttttcaacgcataaagaaatacgttctctcagcaaattttcacactcctaacttgaaaaatataaataatttttattccaaacttcatagtattataaagcttatcgttttataaattataacatattctgtaaatttcatactattcagctttcaaaaaacattatttttattaattactacgcattttgttattgcgtattaaaacaatcgtaaattcaatctcttgaataatacgattttacaatttgctatttatttttgttactaaatttcactaattatattcttcctgcttagatttaaataagaaataaaagaacattcctattgcagtaatacttccaattccgcccactgtataatctaatatagcatgtattaaaatcgatatccataatgttttacttttttcttgaatatatataaaataccaccccgctaaaattccactaccaatttcattactcatagataacaaaagttgacctatagatgaattattgagtatagaaggcattattgcgtggagaatcccccataaaataccgcttaaaattattgctactgtttttgaattacactttaatctattgtatacaaaaccacgaaaaataaattcctcaccaaatgcaacaactaccaaataaaagaaaaatttataaacacctgttatagtaaaatcattgtgaagaataaataatagaagcataatcagtagaagagcaagactttcttttttactttcataacacaatccaaaatcctttaaatttcttctatttgcaattatcaaaatgctaggtagtaatagcatagaaaaataatcatttagaaactttaaagcaatattattccaggtaacattattctgactaataagcatattatttttaaaagccaaatatatactaatatataacaaagcaaattgaaagccccataatactaaagtaattataaaatattttctcccctcatatactttcatgcctgttcctccatatgtaaatctaaatcaattatatctatcatatattataaatctcgcattgttcaatttttaaagaacctttttaaatttacttcgtcaaatctacagctggctgattaccctaactacaaattgaaattcgttaaactctcaaagctaattccaaagctatataaaaatttttcaactgatgagtcctttcttcatcatttcctaatattcttctatcccattcctgagaatcaagtaaatcaccactaattaaaaaatcatagtattcaagtcccctaaaatcgcatacggcttgtacaccagcacattccatctctactgcaatacaggcttctttttttcttttttccatgttagcttttgtttcgcgataaatgccatcagttgtccatgtcttattaaaaataatttcataaattccaccacgtattcttttatttatatttataatttgtattacttttaagtgactacaaattaaattacggtactaatgtatttttctataatttcaatatctggaggactaatatcaattggtaagttgtcaatttcaaagaatgaatattacggtattttacaattattataattagctctattttagcagtaataatatgattaatgttaaaggcataataatatctggtagaattattactacattgccaggattaaaatttctcgattttaaaatttctttaatgtgcaaaatagctgccccaaataaaaaagtagcaaatggaataactgtagctatccaaaatccatctctaatccaatagcataatatccccgatatacctattcctaatgaaacaattccaagttcaatctgaaatccatttgaaacccatcctattgttttagcgaccttttctcttacaataacatgtccaataaaattaaatactccgaaaaatcccactgtaaatactaattgaattaaacacgcattataaatgaacccttgtgatggattcagtaaattatatataatacttaatatccatccgattacgtaacttataatatataccatcaatatttcctccatacatttcattacaaactctattttttataaatacatcctcactatagtacaccttgtaaacccacattattaaatttttctactaagtcatataataaaagtgtgcatttcttttaatctctaatagtcatatttaaaattcttctttacaaagtcagccataggactctccttatcttttcgtatataatctaaatcatcatcatagaaatataaatatgctatactctttttttcatcagatgttccaatcataccaaatgactttggatatcttgcttcataattatcatttccatctacaactttaaaatcataattatttattgaaaattcatattcaggaatataatatttacttttatcaaaatcagaaacaactttatggtctaaaaacttatacttttctgttaatttttctttttccttttcatatgtttctttatcatagttaacaacaagcgttattgcatctgtctcaaataagactattgaaaaatgattatatttgtatgatatatcttgatatttaggtaaatcctcaatagcaggcataaattttttcgcatttgtatcaatcttagttccgttattaagatacttattaatatttgttgtatttgacttattaaggccaataaaaattagtattaaaacactaatgattataaaaaaatatatttttttcatttttaatcattactcctaaaatgtatttaaggcacatttatttactatcatccattagattgcaacttatataacacttattataacatcatttacaaaatattacacatgcaatacatatatctgctctatatttttaagtcttttattctcatatattaatgctccacattactttgaaccataaagtttataggtttccataaaaacataataaaagttacttaatcattaataagtattgactaaaagtataaacggatatattatagataaatacagtctgtaatatatttgattaaaacaattatatttaggttataaataacttataacaatctttgctctaaaaataagatttatattaataataaagttatagaaaattttaaaggagatgtttatatgtcagagttttgggaaaaaagtttttcagaaaagcaagcaatgtggggttttgagccatcaagcactgcaattgtagtggcagattactttgctgaaaataatctgaaagatatcttaataccaggtgttggatatggaagaaatataaaaccatttgttgataataacatggaagttacgggaatcgaaatttctcaaacagcaattaatatagcaagagaaaatgggattaataataaaatttatcatggatcagtatcagatatgccttttgaaaataaactctatgatggtgtagccagctttgcacttattcatttgttaaatgaggaggaaagaaaaaagtttattaatgattgctataaccatttaaaaccaggtggatatatgatttttacagccgtttcagaaaaagctccaatgtacggtaatggtacgaagcttgctgaaaattattatgaaacaacgtatggggtaagactgtttttctataattctaagtctatagagaaagaattcggaaattatggtcttatagactttgtagaaattgatgacatatataaggataatccagataaacctccagtaaactttttaatgataaaatgcagaaaagatatataaagctgataaagctaaacttttgtgcttacaataaaatgatgtagatgtgctagttaactattatgacaaaaataaaaataccaacttttcttaaattgaaatgttggtatttttattttcttatgttttaatctgatatttatatgtgacccaaaaatcacaagtgagattgtcaacctatgacattcaatgcaataaaactacgtattatttaatttccgcaaaaatttcatgtatatttccatcagggtcagcaaatagtgctgttctttgattccacggcatatcttgtggctcgtgaacagaagttgctccctttgagattaacatcttaaatgattcatcaacatcattaggactttcacatggaaaagcaagttcaaatccctgtccagatgacactttcctatattcgtcactatacacgtacataacatctctcatacaaatagcaaaccttactccatcgttttcaaattcaacataattaccaagatcattttcaattctaaatccgagaacttgattatagaaatttttcattttctctatatcatttgtccaaatcgtaataagattaatttgtgctttcatcgtatatttgtcccccttcttaattcaacataaagttcgttttaatttgctattgagttttattttagaatttcgcagaaaaaaatcgcaataaacaatgtgatatttaaaagtcttgtctgtttttaatcaagttttactatttctatattgtgatgtcctactgaattgttaatataatctacttgtatactattttcatctagccactttatagttgcttctccatttgagaacgggttactgtcataattaatagattgatttatacgctttataaaaattatatttttacgttcataaaaatagccttttccactgaataagaaagatgtttcatctacaatcaatactcttttgctattttcatatggcgaattgaagtaaaagtatttatctgaagaaaagtaaaacacgtaattaaataaaataatcgttactactatagtaataaatattaagtatgtttttttatccactctatttttgttataatcaaaaaaataggttggtaatattaatacaattaaaactaatattaacattataatacttgcattaatatcgtatataagtatttctaatccaagaaatacttgtaataaaatttgaattattattaatattaaacataagcaccaaatttttttaaaaattgcttttccatttactttattccccatatttccctcgctatttatatgttaaaataacagtagtaaattcacctatttttatttatcaaaaagaacatttttataacttactacgttaactctagatattgctaatccttcttttgcttctttttattaaaacatactaaacaatcaactgttattcctaataacatacctatcgccatacccatagctaagttatcaaatactaatccaaaagagattccacacaaaattccaattagcatgtaaaagactttatattcactatcgttatttcttttaaacattattttctgtctccttaaatacatgacaaaatgcacttttccactatgtgttaaatataacataaaccgtaaatatagtattatagtcctatacatactattaatgaattataattacgatagcacaatgcccttttctattttatttccttttaaaaattcttttacctcaagaggttttccccctggaaactgtaatatttctataaccaaaataccattattggtggcgactgaaattccttcattatttgcatctatgatataaccaggtggcttagcaatatttgcttctaatgacttggatttaaatattttaatttgagtatccttataataagtatgagcagttggccatgagtttatatttttatatggccaacaactcaatcctcttattaaattatgtatgttaatactactgtcattccaattaatctttgccatttgcttgtttaacatctttacataggaacccctatcactctgttgttttacaccacaaattttacctgtgacaattccatttattgtttcctctaagagttcagcaccgtttgtttttaataattcgtacaattctcctgctgtcatagattcagatatgtcaaactcacttttcataagcatatctcctgtatctataccggtatccattagtatggttgtatttccagttttcatttccccatttattaaactccaatttattggtgatgaccccctatacattggtaggagagatgcatgtagattaatacatccgagtcttggtatatcaagtatctgctgagttatgatttgaccatatgctacaacaatgataaaatcaggttttatttcttttaattgatcaataactacagagtctgtttttattttttctggctgaaaaattggaatttgattcgataatccgacctcttttattggtgaaatttttaccttttttcctcttccgcttggcttatcaggttgtgttacaatcgcgcttacattatatttctctatcattttcttcaatgagggaaccgaaaaatcaggagttcccataaaaactattttcattattaacacctccatttgacactacaaaatatattttgtacttatccattagttacgcaataatttactatgtcatattgaaaaaaattacaatacatatctggataacacgaaatttcaatactattatttatttttaacaatttattcaactttctcaaactactcatttaagaattttctcaaagctataatactacctatagctccaaggaatgttccaactattacaaatggccaaagcattacatttgttataaattcaggttgcacaagagttaattctggaatgaactccaatgctttggtataaacaaagtcatatataaaaaatagtaatacatttcccaaaaatgctcctacaattcctataactactccttcaataataaatggccaacgaataaaccagttagttgctccaacaaacttcattatatttatttcattccttctttgaagaatagacatcttaaatgaggttacaactaaaaataacgaaataactggtagcagaaaaaaagctgcaacttcaagccattttagaactattaccatttctttattatctataaaaacagaatttctattaattgaattagatacaaaaagagtagcaaaatttttatcaactgacagcagatacaataaaaataatcccacaacaaaaagagttgcggatacagtaatcaccgaaaaagctgttattgtactatttctttttaaattctttaccgcatctaaaaagaaatacttaaacttagtaatattcatatttcaccttctaaaattgttttagcaaatatattcaattaattacaatttcaaacctattataccatactttgtaagttccccctgctatatttttaaagaatattctctttcttatttattacatactttctacagcatcaagtgtatatacttatacacacttcattttacctattaggtatattggttacatataaacaatgtgcttaatgaattactcaatttctaatctgattctagttgcttatttttttctttaaaaatagattagattttacactaccctataaaattgtttatttttttgattttgccttagttattgtttatttttaagcacttactatgacttggctttcacttacaccagaattaactaaaagttgcttagttgtttcactacttacataaaatttggcttcattacaaaatctaaatgcatctcttcctatacttgttacactattaggaatttttacacttgttaaattatagcagccttgaaattgggactgatttatgcttgttataccatccgaaattgttacgctttttaaattaacacagtcaccaaacacatcgcaccccatacttttaacactacctgaaattgttatgcttgttaaattactacattgctgaaatacctcattccctatacttgttacactatttggaatatctaaacttgttaaaccactacatcctgcaaatgccctactctcaatagtcttcacactacttggaataattatactttttaaactactacatccactaaaggcatctgcttgtatatttgttacactattaggaatgactatgcttgttagattactacagttcatacatactatagattctatacctgttgtgctatctggtatggttatgcttgtcaaattcttacaactagacgatgatgtaaatcttatccttttaacctcagtaccatcaattttatctggtatcactactgaactatcagaaccagtgtattctactattgttccagttgatttatcaaatttaaagtttccacttgttgtaagttctgtccatgcaccactaccatttaggtaatacccatcaattgttgtatctttagccatgtaacctttagaatcaaaatagtaccatttagaattaattaacttccagcctgtggcccatgaacttccttctgtataccaccagcctctaggatcactcttccacgctgcactcgctcctattggatttagtgctaatactgaagctacgaataatgaacttgctatcacttttatcaatctcaaacttttcattctttacctccacctatgtaatttattgtatttaataacataatatacaattatatcatattttcagtaatgcttttactcctgttcctctaagctcacctgctaatgcattagtaaatgaaagtataaatgatttcgttgcagaatacatggcatctgaagtggatactacaaaagatcctgtaatttcacttgcttctttagctgtatagttcactttgtattaaccttgtcttctacaataaactatgaagcgcacttcaagtcaacgataaaatttcaaaatgccgaaaatattacttataagtttgatatggaatattccaatctattatttatttttgcttgtacatactagtagaatatttgggcttaatctttatgtttctttcttatcatggtgactatgataagttatattttactttttatcaattctaatatttcattatttattatatcaggatgtgtatgatgtatggcatgcccagcaccatcaactactacttgtttgctattggttgaccattcttttaattctgcttgagtgttattccatgctgaatcatatggatcagttaatatttttataggcatatcacctaaatgaccattttctaatacagtttctgcactagtttttccttgattaccttcatctataatatttttgttatacatagtctttagaatcattgataaatataattgttttaaatcatctggatataaattaaaatttttcgaaaaataatctgtatgattgactattaaccttgctattcctattgattttaagaacttaaaagcatattctgtgctcttgggaatttctaatccagtgtcagcataatactgtggattaccaccatctattaaaactataccagatacttcgtttttatatatttgcgtaaatcttatcacctctaatgatgcaaatgaatgaccaactaatatatatggagccttttggcctgattctttaagtgcatcatgcatctcctctactatagaatctatatctctggatttatctgtcacctcactccatccatgaccaggtctatcataagttactaccttagcataatttgagatttcattatatagaggataaaaatctgcataagagcttggtgcttcatgtcctgaacaaaaaattacagttttatctccttcgcctttactaaatacattaatcttatgattatttacatcaaccatttctcctaccggaggatatctttttgcatctgtatattctcctattctttcataaacaaaacctataaacaaaatgaaagccacaaatataaaacttagatatacatattttatgaatttctttttattttttgttttaagcctctctttcttctcttttctactcaaatacatttacaatcactccttgaagccaatatacttgtcctattgtggctcttataaaaacatccttttatttttttacattttcccctttaattgtaacataacttcaaatataaaactccccaacttttggaattgataaaggtttgattaatttgtcatatttataaattatctagctccatttttaataatctctttatctctctcattaatataactctaaacatttttgtcacttaacccctataaatatatctttactatgataaattttgttactaccacattactcaattttcaaagaaaaccttttgatttactacgtcaaattttagatttgcggtattttaaataaaaaaataccgcaaatctattctagttatgaatagtgcgatattctatttactattaaattttcaaatataatagcatctgtaagcaactctgcaaattggaatttgggataataatcaacccactttctgcttacataataaacatggttgtatcttttctcattaacattaatgagacgtgtcatttactagattggcaatagcttcaactatgcatttcccctaattgtcttatacatttaattaatcttgtaatgtagcaaagttatctttctttacaatagacattatcttttcaaaatgttttgtatactctttcaatatattttactgcattttcaagtcctttttcagattcaataatatttttgatttcttcagcatttcgaatatatttatcattttccatttctttaaatgctttaactaaatcatatactttaagatttttttcctttaatggatgtgtagtaagtccttttaaataaagtctgttggcccaaaacggctgatctaccgtaaatggcatgattaattgtggaaccccactaaggagagcctctgacatagttccgactccaccatgatgaataatacatttagctcttctaaatagtagtctatgagatgctttttttactgccataatattatcatcattttcaaaagtcataccacttgttccagttaaaacaatagccctgttaccggtctcctttaatgctttaatcaacttatttttaaatattttagggtcttttagaggcatactgctaaaagacacaacaataggccttacaccggatttcagaaactcctccatttcatcatcaagctcagtttcaactatatccaaaaagaaaaatcctgaaaggaaaacactctcactccaagtgtctacttctttaaagagaaacgggctaatcggatagactatcggaatatttttcccattcactttaaacgcaagctcccctgcctttctttttggtaaatgcaatgatttttttctgaagtcgttaatatgtttcatataagataactctccaagtgaagaagctttataagagagtttatttaagaatggtccaaaattcttattagcagatatggctaaattagggaattcagtaatcggatagacaattggaataggaggcatactgatgcaaggaatatttaaatattcagaaatatcaactgcccctagtgctttaggatgatacactattatatctgctccttttgaagcctctaaaaagtcatccatactctttctatatgcaggtgtgattacttcctttgcatactttaacattctaaaaacattatagtgtccgccattaaaaatcttttttccttcctcactctctaagatagccataaggtctgctgaagcttcataaaaagtcacgccattttcctctacaaaacttttaaaactcgcccccgtacacaccaatgcttcatgcctgttttttatgagttcttttgcaagtgcaacatatggttgaacatcgcctctgctacctaatgttaaaaatactactttcatacatagtttctccttcacaaatataatcagttgttagttaaaactatcccctgtttacatttcttatgttcttacacttaatatattctgtcccattacgaaactgctaattcacataatattattattactttttataagaaaatgatgaagatattattatttaaattaatttgatactaactttttacagattgtgtattactgcttgctaaatttttgaatattccctaataaggttatttttttattatcaataattattccaccagcatttgtgattgcgtatactttctctcttttttcttccaataccttattaatgtatttattctgaatttcagtttctttatagtgaacttcaatatcaaaatccttgatcaaatttagtcctgtattgtatgtaaacattttataatcttcatctggagtaatgtgatattctgatatttggatcattgctcctgcactactgccaataatgacacctgtaaaattttcaatatcatcaataaaattaaactctttaaggcgtaacatcattttatctggcagaccactagtaaaaaatattatgtttgcattttcctctgtatctttaaaataatttatccaatttatattttcttctttaattcagtaattaaaaaatggaacaacaatactttcataatatctaccattattcttactgtaggcattctgccaatcattatcactacatatattttcgtcagatgataaattgaaatttaaaaattcattcatatatttttatctaatatccaagcttttcatgaattaaaacaacttcatattcacatcctgtaggttttcgatataatacagaaaaatttctacatattctctgtgggcttttacagtcgtaacatttatccccctttaccgcacatggagtttttacccctaaacgttttgcattaagtggtgctgctatatttcttgctctgtctaaagcaccctcataatttgaagctattttattttcaccaataattaaataaactttatcatgtccaaaactgattgcagatacacgatttccagtattatcaatattaataatttctcctgtttcggcaattccatttactgatgagatataaatatctgcaaggtttgctttctttcttatctccatagcactcatgttttcagttaatcgcatatgccagtacacctcattatgagatgctaaggcatcatataatttcatttcctctactgtaactgagcctcctattccaatagttctattgctcatttggttagacaaatactttgttgcttcatctgcatgactaaattcacttacattgtatcctaagcattcgaggctatttttaagttttgtaaattccataactatgtcgctcctattcatactaaaatattcttgtgcttctcataaacaaactcctatttatctattagtaaataggtatcattacatctcaataatttactattatgcattaatatagattcatataaactaatattattatagcatattttgtaaaaaacattatctaaattgagtgctacgcacttttttagaattccgcattaaaaaaatcgtaaatccaatcttgaataatacgattttacgatttgctatttatttttattaattcataattttatgaagattgtgtattaaacaaaaatagtattacatattctttagtagcgttacttatgttaatattttacaattacaaatattaacataagtattgatataactaatcctatgattccgaccatacgattatattttattacctcgtcacttggttcaaggttttcatttttaaattgccacttcttaccaaacaatgcactttctcttgggtaaaatattgtatataacatcacacatgcaattggtataaaaagaattactgcaataaatatagtagcaaatttcatctctatcccccattttcattttcaatttattccatcattttacacaccttttagtttttttgctctataacatttctgttttagttacttcaaccattttactattatgaatcaattatagcatattttgtaaaatctacattattcgtaactattcagctatagcaatttattttatatttgatataattttaggcataataaataggggtattaacttacttaataccccagatatatcttagtaaactaaggtcggatcaactggattgttagtaaaaatagatataatactgtcaatggtgtttaatccatgctttcgaaccgtggatacatatccacgtattcgagtaaatgcatttgcaccctcaacacttctaaatgttccagatactttttgtttaaccttagccattcgcaaatctcgttctgctagattattatcaaaagggatactaaaattatacatgaaagaaagtatttcttctttatgagcgcttaatctatttaatagattaagacttgtacttttcttaactttcttctctgagtataatttccaattcgcactataatcttcgtcgaagccatcttttagtattctatcatatctttcttcaaaggcttcagttttatctaaggttaaagtattagctacattccaatttaaatctacttctttttttatttcaattagtagtttcttcattggatctgcccacatttgtttttctaactcagttattgcatttagttctctcaaaatgtgtgcattacatagagcatgtttacaagaagtatagctatgataagttttgaagcagtcatggactgctgttccgttgaaattaggaagtatttttattttatctgtagctattttaccacgcttttcatgagcttcatagtaagtatatttatcattagaagcaacatgtaaccactgacgttttttatctatataaattcctgtttcatcaaagtgaactgcatcaagactgtttgtaatagaatcttttatattagcttctataggctctaattcatcgtgacatttgttgtttaaattaaccattgtcccttgacttaagcttataccaaataaatcttcaataagctcactacctcttttataaggaataagctgatattgtgttaaataaacggctacagattttactttttcaccatattgaactgtgtttgttaccccatctggaaacttaccagtattccttcttctacactttggacattttttaacttctgctctatgctcaataattttagcttttatatctggtatatctacaatttgacggataatatatctttccggagttacatcctgtaaggattctccgcatatatcacacttatcaacaccatgtatctctatttcatcaggattatcacttagttcaagggtagatccttcatgaccttcttgcccaccaggctttttacctgatttagttcttaaacttttagttttctttttaaatccatctgtcgatggcggcttactactattattactatttttgcttacttggttctctaatgatttaacacgagatgttagtgattcaatctgagaattttgttcttttatttgattagatagagtttttataacatctattacctcagaaatacctttattatatatttcaattattttgccttcgctcacggaagtcaccaccttatcattagtttttgcaagacaagttttataatatcaaaaattagtgataatggaaagttttttagtaattaatgttatcatacaaattcaaattatttaataactgaatagttaccattattcaattttcaaagaacatttttataatttactacgtcaaatctacagattgtgtattactgtttgctaaatgtttgaatattccctaataaggttatttttttattatcaatgattattccaccagtatttgtaattgcgtatacattctctcttttttctactaataccttattaatgcatttattctgaatttcagtttcttcatagtgaacttcaatatcaaaatccttaatcaaatttagtcctgtattgtatgtaaatattttataatcttcatctggagtaatgtgatattctgatatttgaatcattgctcctgcactactgccaataatgatacctgtaaaattttcaatatcatcaataagattaaactctttaaggcgtaacatcattttatctggcagaccaccagtaaaaaatattatgttagcattttttattttaactttcgcattttcctctgtatctttaaaataatttatccaatttatattttcttctttaattccgtgatttaaaaatggagcaacaatactttcataatatctaccattattcttactataggcattctgccaatcattatcactacttatattttcgccaaatgaaaatggtattattaaaactttatcattagaatttatatatttcgatactatatcttttgcccaactttcatgaaagttatataaactaaacaacatatttaccataaatatcccccttattaattcaaaacaattactactatgttttatactagtatgccgaactattcctaactaaacttttcatgccattgctttttaattggtttaaaattcttttttgaaagttcagtattacctttttctatataatttttcttgcatcgattcctatagagcgattaaatctttcatccaagtaatacaattgagcacacttgctacacttatatgctttcataatttaatcccctttgttttagaattgcgcataaaaacctgctaatgaaagtcaatacttttgaagcaggtttttaaattattttttctatttttttgcatactaattagaccagctgtttttctggtccaagcctttattcattaaattgtttattacttatatacttcttttactcttgcataatatattcttaaaaacttatttaatccagcaattttagctacttttgaagcttttccttcagcttccttttttaaaacaaacaaatatacagtatcactctctggtttattgctttttaaacatttcattatttcaaatccagtttttcttagggtagcagaacctcgctttgatatccgccttcgcgttccggtaaactgtcctgattgatatggtggtgcatcaatgcctgcatatgctatcaatgcttttccgctatggaatcttctaatatctcctatctcagccattagtcttggtgcaataatatcacctactcctgccatttcacgaacaactgtatactcctttaaagactttgctaattcttgcatttgtgataaaatcaatgcaagagttttatctatttctcggagaactcgaacggcttccaatactaacattttggttgatggagcattggaagataaagtagggattccttgctgagctaagtcatatatctttatggctttcgcttcgctttgttgatatcccttcttttttgcccaatttttataattgctaataaactggttctcacttttttttgtaatattatcataatgccagtattcttcaataaaatcatttagcttatctttttctggtttatctgaacggcttttcagcatagttttaattcccggcattgtgtagtcaagcattgtagttaaagatagtttactttctattcggagtttaatgtagtgaccgtactgtcttcccagaagacgtagttgcacataaatttcttcactagattcatagttaattaagtgaaaccagttatccaaaccataattagcaatctttatagaatccagcttatccgttttcccctttctaagaattatgcttgcatattttttcattatcaatggattaataacagccacaaaaattccatgctctttaagaaaactaagcactggtaggtgataattccctgtggcttccattacaactcttacttcatcatcaaggcattttatcatagatactaattctgcaatttgattttctgtgtgcgtaatctcatatggagatctaacgatctcgccgtatggttttaatatacatactgtacttttttcttttgatacatcaattcctacacttatcataagtaacctccaactttatttttgtaattgtctccatccgcacttattacaattcattttggttagttacacgaaagcctctagggtttcaacctgcttaatcgaatatttataataagggatggctgacagtttttatgacggatgttattaatccaaaaataccgacgtcagaccaattactccctaattataaataaaataagtgcaaatgctaacccgacatatctggtttaacacttacacttatacagtaccaaaaatatcgtaaatctattcttagttttatgaatagtacgatactctaatttactattaaattttcagatataatgacatatataagtaactctacgaattggaatttatctcttcttaccttttttattgttagcaacaaaaatgcataaaaaagtagcacctattgcaatccaaagggcaatattcatttaaatcctcctctcaaatcactattcatcttttagtattatagcatattttgtaaatatcacaccgttcaattttcaaagaacattatccgaattaacttctaggtactttctatatggtatacattaaccatttttatctaatctacaagcccatatcctattattttatggctatccattcctataaacacaaaaatattattaggaacataattaacatctaatataaattcaacacaatatgcatcctttccccaataagactcatcagtaagtctaacccctcctgttatagtttttatagaaattttgctatctttccatgttccttttactttcttttgggtttctgaatctaattgattaaatgcaatttctctaatatcttgttctgatgaacttatatcactacattctttaattcctgcaaactgttctcccaaaatgctctttaaatcagaaatgattttctcattctttccaatatactgaacaataatatttccctttttaaagaagtgaggatatgaactccaactagcactttttgatttttcttccccccatggttcagtaattgtatatccaaatccatctttatcaatatttagtgaatccttttccatttctctattgctattatatatatatacgactaattgctcattatccaacgttattatctttcttgtagttggtaagaaatcttcatctgcatccttcatttctaatttatatccgtttaatttcaaaatgctcgtgaaatcatcaatagtcgtgatttttccaccactttctgaatttgatgtattactttgctcagcttgaatccatgcgccatcaaaacctatgttatatccatcaattgttgtattttgggccatagcaccactagcagataaataataccacttatctccatattgcagccatcctgttttcatatatccgttgttatcaaagtagtaccactttccgtcaatctctttccaacctattgaccatgaactaccatctgtattccaccatccattagaatcctgtttccattctgcatttgcgactattttatttaatgtaagtatcgaagttactgctaatgaagtcgctattattttacttaaatttttcatttccacttacctcaatttcattttttatttatacataataaattaccattattcactagattatagctttacacaacacttattataacattaattacaaaatattacacatgatatacatatactgactctctatttttaagccttttattccaatgtttgagggtaatacattactctgacctataaaatttttagcttttattatttctttatttgtataagataatttaagccatttgaatcactaaatataattactaatatatttagttgcagcagacatatatgccctgataacatatatgtctgctttaaaaattaaaataccaacctttcttaaatagaaatgttggtattttaattttggctgtgtttggtactataaaagtgcaagtgttaagcatcaaattattaatgttgaaatatagcttagattgtccacctataattctcaatataagaacattatgtattatgtctaaatcatgcaaaaaaacattgcaacttctagatgatcatggaatatttcaatctagtctttacttgtattaattgttactcatggatgattacgatttatttttactggtattgcccaaacaaaaagagccgtcgctggtccagcaacaaaaaagcaatcaaccaaagatctgtattctcttgcaatatttaaactatctatggctaaagaaccaacaatactaaataaaaaagcaattataaccaaacaaactcttctgcttattttaccacatataaatttttctatatctacttttaagcagatattaaagcatattaaaaaggatattacatatgttgcaagtgctaaaaaataataataacttttcataaaaataatcttccttaatctataaataaaataactcttcaacattatattccaattataacatattctttaaatattgaaatatacgttttttacttactacctcataatttactatcacgttttattttagcattgcgtaacaaaaaaatatcacaaattcatactgaataatgtgatatttcaatctactatttatttttcctatgtatactgaaagaaaactgtgaattaactcaatcgcacgttattctcgttcatagaactatattcccaaattacttatttggctcagaatcccatccatttaacttactatttccattaaaaataagtttctgctcacttaaataatatacatcttcatctggataatatgccatgtcgccttcttctttagtaccaacatccaatatttccaatgtttcattcccggtatttatgaattgatgtgctatattttttcctgcagttttagcaataaagtctcccttttttattaaatattctttaccatccatcctcagagttccacatccactaataatcataaaaaattcttcttgttttgtgtggctgtgatatttagcacttttagctcctggtaatattctgtcaatatttatataaattttctcactaccagctgccttacccaaatatgaagtattagctttgcctagaaaatctattgtgtattcattaggcaaattattaatatttaatatattaaccataattcaaaacatctcctttccttttaatatatttaatatgatattattatccttgaaatattatatcaaatctagctttattttctttaagaacatcttttttcacttactaccacgtcaaatctacagattatatatgatgttattccatggaagtaatatcatatcttatttttactactttatcttctgcattccaaaattcaattgttacttttttttcatggtctacatatccaattactggcgagctaggcatttgttcctcagtcctcttataatagttagtaccataagcattaatcacatcatcaactgagctccctaacccaatacctttacttgtcttcatattactgttggtttcactgttaataataactctaataatttgtctctgtttattcgtagcaatttttaaaccatcacttagtttatagtagtcaaatagtgcattatcaattttttcaagatttgtcccgtatttttgtataaattccttactatcaatactctcatacatttgaatgccatctatattttcttggttaagagtcgttgttttggtaaacataaagctgcttgacctttggaaatatttataagcaccaaatataatacagcaaattaagataaaaatagtaatgataattttaaatatcttctttattgagaattttttctttataaatcctaaagtaagaactgtgactgttaacaaaaatatacttattataattccgataatactcaacgttgattctccctattattacatatttgcacttgttcattagattatagtgctacacaacacttattataacatcatttacaaaatatcacatatgctatacattcattatcagagcccaaaataaagataccaacttttcttaaactgaaatgttggtatctttattttggctgcgttttaatgtgattttgaaatatagcctgaaaaaattataagtgatattgtccacctataaaactcaatgtaggaatattacgttcataatcttaaattacttaaaatatgtttcaaatccattattaacgatatatgaaccctttggaacttgaattgctactaaatatatattcagacagtcgacacatgaacccattgcatttaataaacacagaaatatagtgaatccatttaaccatcccaaaaaatttagaataaagggtaatacaactgacaacaaaatgaaaggcataatagaaataattaaaaatctgttctttttgactttttcagtagtgtaaacaaatccgaaaaagccatttatcccccaatatatttgacttgatttaaatacattaggtataaaacaagcatgaagaaattcatgtatagtcataaagatgaaaattgcaacaatgtatataagagtaaataaatttactgtgaaattaatactaaagccatgcctactactgctaaaaatttctttcaattgtggatataaataataggaaatagcaatagatataatcccatttataagcataaaaggcactgataataacattgctatacccaaattagatggttcttttagtttcgtccagccctctgatattagcctaatactaacttccttatctgcagaaggtattttctttaaatatctcattaattaaaatcctttcatcaaaacataattgatttttattgcataatccttttttaggcaagttactgcataaagctagatttatataaagaaaaatgcttcaactaaaaagtagaaacattttttatatagcaggcatttgaaaatgagagtcgaacttatgttgatatcaactgaagttgaatccatgtttgcttcatatatgtcctgaaatatatactaactagaaataagaatcatgcttttgtaaccacaagggtcataatatgaaatgtttcattaggaatttgatggtttcgattcttaagtgaaattccaaatctatgatttggtcaattgaacttactcagtggacggagtgaatcgagtttccttttagttgttccaattatgctagttcgaaaagtgatgatccaaattttatatttggttagcagaactttcccattggcattttatatttcgtttttcgaactttctctgtgagcgcgtacctttgatgctagcatattggacgcaacttgtgatcttagaataatccatcataatttccttagaaactggaacaacagcacaattcttatttcggtaagtcattgcataaattatgtttagttgaaatctccatcatatattgcttttgccattgggaaaggttcaagtgctctttctaaaattccttgaacatatcctattaatactccataattcacaattgggatttcatatttaactgcattaccaattcttgaaagcatagcagctctatttagcatacaacctccacaatggatgataagtttgtatttcttaacatcatcagtaaaggaatttccagaagaatattcaaaattaatttgtttccctgtcatttgacgtacccatcttggtattttaactgttccaatatcgtcacattgtctgtgatgagtgcatccttctgagattaatacataatccccatcttctaaactttctactgctttagctccttttacaagctccataagatctcccttatatcttgcttgcaatattgaaaatgatgtaagcattatatccttaggcgtatctgctgatgcttttaagaaaacttgtgaatctgttataacaagtttaggttttttctttaaattttcaagagtttctcttagctcatgctcttttgttacaatagctatggcatcactttcaattatgtctcttattgtttgctgctgaggaaggattaatcttcctttaggtgctgccttatcaataggtgtaacaagaactactaaatctcctgggcttataaggtctccaactaatttaaatttatcttcattgtctggtattacacttataattttttgcttaagctcatctattccatttttatttaatgcagaaactgaaacgacagtagttccaattgtcttttctatctcagctaattcttctttttctatgcttttcttatctgccttattaaaaatacaaattgtaggtatcttcttttcctttatttgatctattattgatctatcattttcagtaactccaacagtagcatctaccactactaatgcaacatctgtttttgataaaacttcaatagttttcttttttcttgactcacctaattcactttcatcgtcaagtcctgctgtatcaataatcatacaaggtcctatcggaagaatttctatagctttataaacagggtctgtagttgtccccttaacatcagaaacaattgaaatttcttgatttgtaagtgcatttataatacttgattttccagcgtttgtcataccaaatagagcaatatgtactctttctccagacggtgttgtatttaaactcatattatttctcctttgaattaattttaattactcaaaaatatttttttaagttgcctattctattataatataaaatagaaatatatacattgcaaaataattctttatttattgatgatttattatcagtacaaaaatattaaggagtgttcattttggattatagattagaacaagatgtattaggtgaaaagaatattgataattctacatatagtggaataaatacagcaagagctttagagaattttgatttaaacagcaaaagtgtaaatttaaatttaatacgagaaattgcacttataaaaaaagctgctgctatgacaaataaaacattaaaatttcttgaacctgaaaaagccgatgcaataataaaagcaagcgaagaagttatagacagaaaatttgatgatgaatttaaactaagtgcatttcaaggtggagctggtacctctactaatatgaatgtaaatgaagttatcgctaacagagctattgaattattaggtggagttaaaggagactacaatttagttcatcctcttaaccatgttaatatgtcccaatcaactaatgatgtttacccttctgcccttagaattgcggcaattagattgataagaaaattaagtgattctttatcaagtttgcaagaagctcttcaaattaaggagaatgaattttcagatataataaagcttggaagaactcagttaatggatgcacttccaatgactgcaggacaaagctttggagcatattctaaagctatcgaaagagatagatggagaatctacaaagtagaagaaagattaagacagataaaccttggtggcactgctataggtacaggtttaaatgctacaaataaatatgtattcatgatgacagatattatccaaaaccttactggccttgggatagcaagatctgattaccctatggacattacacaaaactgtgatatattcgtagaaacttctggacttttaaaatcgtgcagcgtaaatcttcttaagatttcaaatgatttgaggctccttaattctggccctcgtggtggactaggagaagtaattcttcctaagatgcaggcaggctcaacaattatgccaggaaaagttaatcctgttatcccagagatggttgctcaagtaagcttaagagttatttccaatgatagcgccataaccatggcaagttctatgggacaattagaactaaacgcttttactccacttatagcagaatgtctacttgaatccctagaacttcttgaaagaagcgtcacactttttaaagataaatgcataaatgacctaaaaatggatgaggatagatgtttaaaaaacttagaaaactccttagtttccgcaacatccttagttcctcacctaggttatgataaagccagcttaatatcaaaaaaagccttagcaactggaaagaccataagagagattcttctagaagaaaatatattacctgaagatattattgataaaatattatctccaactgaattaataagaacccatatcccaggaaaataaaacaaattatagatacacaattttaaaattcagcttactaaatgattatatttacaaagttgctacgtatttaagttagtatcttcactagaaatcataaatatatttgtggagaaaacatttgaaaatgagctgttaaaggttcttagctgtaggttgttccattttagcttgtgaagtgagagtccaaaattttattttgggttcttgaacttcctcagcgaatgtaatgagtcgagcttccctaggaaagttggagcatgctaaagtggatacaacctgcggcttagaaccttcagcgatattttcatagcttttcggaatcaaaatatttatgatttggtaagtagactagggaatcacttccctaacccctctcagaaccgtacgtgcggatttcccgcatacggctccccacattataattcacagtatatatgatatatcttcttttaagttgaaaatattaacatatattttagctttaggtattttgaagcactcaaacatagtgtcaaaacttctccagttataacttcttttctgacttcttttgtttagccatttaaaagttagttttcttactaaatatctgaaagttgcgagacttaaactgttgtcagtgattccgtaatacctataatatcctattagtctctgtgtcagtttctccattaataatgtgagcggcactgttctattattctttaaccattcattcaatctctttatgctagctccaaatttctttgagctagtcttcctcttaactctaaaacttccattctttctgcaactgcagaagtgtgtaaatcctagaaaatcaaaagttctatctttatatgattctaactttcatgctctcttgaattttctatcatagtaggcattcttaccgaaatataatattttagttttatcttcagctacctgcaagttaaatttgtctaatctgtttttcaatgcttcatagaaagctttcgcttcgtcttcatactgaaaacagcaaacaaaatcatccgcatagcgtactatgtaagcctgtcctttacacttctttttgataaagttattaaaccatatatctaaaacataatgtaaataaatgtttgctaatgttggagatattattcccccttgtggagttccttcatatactttataaaactttccgttttccattattccagttttcaaaaatctacctatatatctaagtaagttcttgtctgcaatcctgtgttcaagaaatttcatcaaccacttgtgttcaacattatcaaagaatcctttgatatcagcatctacaacataattcacattcttttcagataaatatacatttaagattttaagagcatcatgacaacttctattttgtctaaacccaaaagaactatcaatgaaatcttgttcatatattgattttaatattttattaatggctaattgtacaactttgtcttcatatgccggtatacctagaggtcttttcttgtttgaaccagacttatctatgtatactctccttacaggctgcggtctatatttaaaagtcttcattctaattagtagattatcaatattattctctaagttagttccatattcttcctttgttaccttatccactcctgtagccttatttccgctcagttcataatggcataaaattagcatttccttgttaactaaatgcattagtgatgtaaatttctctttaggattatttccagctatttctgctatcctctcaagttttgtgtacattttttttcctcctctgtgtgagaatttctgtttctcttttcaaggtctataatatgttacacccttccctccatggtcattactcatttcttcagtactatggtgtaatccgactactcattatcatttgaatacctctgatttctaatcattgttttccatactctgaagtcagagaataatgagtcctcccaagttgacgtactatatcaatgtataccatgctacaccttaaaaccacgagaaagcacagatattcttgcaataatgattatctatgttctgacttctaatttaccgatattatcgtcctttctgactttgtgataatttcgtggctagtagtttcagcattcgcttgcggcctggtaccttgtttgtctacacttaacttattacatcgccataataagcccaagactaactaatgactggttgctggcctttgtcatgcaggattcccacctgctatatagtaataatgaggaaggttagccctcattatcttttacgcccttgcttggcgtaccggtaagttaccacttaaatttaattttaaagttggatatatagatgtgccctttaaagtatatttttactctaaagggcacacttttattttaataataaaatcttggaatatttctctcgtcatcaaatccaggtataactggtggtctaaattcattctttctaaagcttctgcttgattcagttgtattaagctctgcaagccttgttactccaacataaatatctgatatcctgtaccatgttgcataatcaactactcctgtttgaggtaatgtaaatatttgttgaaatgttttaactgctgcagctgtctttggtccatattttccatcttcagcaatcttaggaataagcggataatttcttgctattctatttaactgaccttgaattgctcttacagatgctccagatgacccaagtgttaattctcttccagggtatgatactggtattccagcaaccttctcagctgttgttaattcaatattatttccatagtaacgtgttaatatatcgtatggtccgagaccttggcgtgataattgctggcttccccattgacttaaccagttaggacaactaacgctctttccatcgcaatactgtgcaaaaagcggctgtttccttccaactcttcttatatatgttgagaaaatttcatctacaatttcacttatgttatcataaatatttctaccataattaaatgcttgatcataagctgtagaacttgtaatatcgaaattcttccccttacctctataccattcagtaaagatcctatttaatgtaaaagataccatacaaaaaatatttgctcttatggctgattctgtccaagttgaatatatttcgcatgaagcaacatttttaatataatctttaaatggcaccttataatttggtgctgacggatcatttgggccaccttgatgaacaatgacaaattcaggcactactggctgtggcaatactacccctgaagttggcggtggtaatggcttatcttcttcctctggtatcttaggaggaaaatttccattcaaagtatttggcagtatctctataacttcttgtctcatagggcctctgcctaaattagtttctaaattacatatctgatatgcaatttctgtaggaaatacttggcatcctcttattattataggattaaacccttccctctcaacagttatatcatataaactgtaaggtatttgattactatcaggatttaaggaatattccaatggtggtgctggtagttctataatatcagttaatccaactacatcagtaactaactcaatggttctatcattacctaaagtagattgtcctcttactgttattctagctctatctactggaatataatcgtttcctctgaaacattgtatcttcaagccacctattcttggtgtagcacctccagtgcttggtgtcgttccagtatttgctggggcacttcctgtaatgttccctgcacctaatgtagcacctccagtacttggtgttgtgacattcccagcagtacttcctgtagtgcctcctgcacttaaagtggcacctccagctgtatttggtatcatattttcgccagtactacctgtaacatttccactacttatattctccataactttcctctttctattttttcaaaatattatatttaacaaattcaatatttattactaaaaaatataattatggttaataattatttattgaaagtgcataatatttatgtgatcttaatatccttttatgtgaaacctttaatgtagaattttatattccagattaatttaattgaacttatataggacacgaaggctatgaataaatgaaactttcttcaaggcaaaacgatagtgttggtagaaaaaccgtacaaaatatccaatgaatctttggtccattattgtctttcatatgcctaaaacaaattttaggaggtgtatttttaaatgataacacacaaactagatgcaaaagacacgctcaagatagaaaatgaaaagagaagaaaaatattgccacctgaacagacacttattaatcttgatttgcagacaggagatgtaatggctgatataggatgcggcattggatattttactattcccgcctctaaaattgtaggaaaaaacggtaagatattagcacttgatatatcagatgaaatgctgcaagatgttgaagaaaaaataattgaaaatgatatatcgaatgttgagactattttaacagaagaaaataacttaaaattagaaagcaattcagtcacatttgcttttgcaagtaatataattcatgaagtcgaagaaaaagagagatttttaaatgaaataaaaagaataatatgtccagaaggtaaaattgctatacttgaatgggaaaaaattgatagtgattttgggcctcctattgaacgtagattagacaggatggatttaataaaactattagatgaacttaatttttcaaccatatcaactatagatattggtgaagacttctacggaataatcgcccaaaaataaatcaatttctattgataaaccacctataatccatacttatgcgtatatctcgccgaaataagaattatgctgttgttccagtttctaaggaaattatgatggatgattctaagatcacaagttgtacccaagatgctggcctcaaaggcaagctttgaactagcatacttggaacaacttttaatataagaatcaaaaccatcaaattttctaatgaaacatttcacaaaagcataattcttatttctagttaggatatatttcatagtataaatctaacttttaattggtttatcatatggttccccattgaaagtttgaaatatatcaagcagagaaattttcatattcatctgtaacaaatatatattcaatttggactgatatccatataatttccactcccattctggagccctattcataaacaacctaagaactagatttattagattaacagatttgcagagttgctaagagactttaagtttatatcttcactagaaatcatagatatatttgtgtagaaaacatttgaaaatgagctgttaaaggttcttaagcagagaacccaaatctttgatttggtgagaatcgtttactcagcgaacgaacgtgagtcgagtttccgctaatggttgttccattttagcttgtgaagtgagaatccaaaattttattttgggttctcgaacttcctcagcgaatgtaatgaatcgagcttccctaggaaagttggagcatgctaaaatgatataacctgctgcttagaaccttcagcgatattttcatagcttttcggaacaaaatatttatgatttcggtaagttccacataagtctagttttaaagttctatatctatagataaacacattgaaaatttgacttatgcatagtaatttctagcataagtcactgattcttcaattgatttattttggtttaatttctcataaatactaactatgtcattaaaaagctcttcaatatttgcacgtgctctgctactgaaaatacaatttttcaatctattccatatattttcttgcggatttaaatcaggagaatatgttggtaaatttataatcactaaattttctttaccatcaagatattgttgcattccagagcaattatgagtcctagcattatccataattatatatacttttttatctttattaatttcgagtagataatcaaaaaaattgcaaacctctttattagtaatgctatgatttgaactatatatatctgcaaaagtttgaaatgagccatgaatttggctagcgccgacgatatttactccaatatgagaattatttctttcaagaataggggatataccttttagactccaacttctacgattttgagattctaacctcacataagtttcatccattgcatatataacaacatcagaagcatcttctacagtatcgagaagggttgtcattttttttaaaggcttctttttctaaagtattagctttagttggtttaggttgagcccttttaaaggtataattttcattttttaatattcttcttatagtttcatcagaatacaatactccgtattcttgatatatatattgagctaaaagtggtgtagtccagttgtttccaataagatcatatttattaggtgtagatgtatttaacgttactattaagtcttgtttcatttcggcagtgaaactgctttcggatcccccgcgattatcaattaaggatttcaatccaagtttgttccaattctttaaataagttattactgtttgtaatgatttttgtatgtcagaagcaatatatttgttgttatatccttgaattcttaacaaaacagcagttaatatgcctcttgaataattatcttcaatgcgatttctcatggtttttaattcttcaattgtatatccgtgctttataatttcgaatggttttctacacataataaatttctccttataattgcataattgtatatacatagtataagaatctttattttatttattcagcataaataaaatttccgttgtgggtatctatatagataaacacattgaaaatttgacttatgcatagtaatttctagcataagtcactgattcttcaattgatttattttggtttaatttctcataaatactaactatgtcattaaaaagctcttcaatatttgcacgtgctctgctactgaaaatacaatttttcaatctattccatatattttcttgcggatttaaatcaggagaatatgttggtaaatttataatcactaaattttctttaccatcaagatattgttgcattccagagcaattatgagtcctagcattatccataattatatatacttttttatctttattaatttcgagtagataatcaaaaaaattgcaaacctctttattagtaatgctatgatttgaactatatatatctgcaaaagtttgaaatgagccatgaatttggctagcgccgacgatatttactccaatatgagaattatttctttcaagaataggggatataccttttagactccaacttctacgattttgagattctaacctcacataagtttcatccattgcatatataacaacatcagaagcatcttctacagtatcgagaagggttgtcattttttttaaaggcttctttttctaaagtattagctttagttggtttaggttgagcccttttaaaggtataattttcattttttaatattcttcttatagtttcatcagaatacaatactccgtattcttgatatatatattgagctaaaagtggtgtagtccagttgtttccaataagatcatatttattaggtgtagatgtatttaacgttactattaagtcttgtttcatttcggcagtgaaactgctttcggatcccccgcgattatcaattaaggatttcaatccaagtttgttccaattctttaaataagttattactgtttgtaatgatttttgtatgtcagaagcaatatatttgttgttatatccttgaattcttaacaaaacagcagttaatatgcctcttgaataattatcttcaatgcgatttctcatggtttttaattcttcaattgtatatccgtgctttataatttcgaatggttttctacacataataaatttctccttataattgcataattgtatatacatagtataagaatctttattttatttattcagcataaataaaatttccgttgtgggtatctatatagataaacacattgaaaatttgacttatgcatagtaatttctagcataagtcactgattcttcaattgatttattttggtttaatttctcataaatactaactatgtcattaaaaagctcttcaatatttgcacgtgctctgctactgaaaatacaatttttcaatctattccatatattttcttgcggatttaaatcaggagaatatgttggtaaatttataatcactaaattttctttaccatcaagatattgttgcattccagagcaattatgagtcctagcattatccataattatatatacttttttatctttattaatttcgagtagataatcaaaaaaattgcaaacctctttattagtaatgctatgatttgaactatatatatctgcaaaagtttgaaatgagccatgaatttggctagcgccgacgatatttactccaatatgagaattatttctttcaagaataggggatataccttttagactccaacttctacggttttgagattctaacctcacataagtttcatccattgcatatataacaacatcagaagcatcttctacagtatcgagaagggttgtcattttttttaaaggcttctttttctaaagtattagctttagttggtttaggttgagcccttttaaaggtataattttcattttttaatattcttcttatagtttcatcagaatacaatactccgtattcttgatatatatattgagctaaaagtggtgtagtccagttgtttccaataagatcatatttattaggtgtagatgtatttaacgttactattaagtcttgttttatttcggcagtgaaactgctttcggatcccccgcgattatcaattaaggatttcaatccaagtttgttccaattctttaaataagttattactgtttgtaatgatttttgtatgtcagaagcaatatatttgttgttatatccttgaattcttaacaaaacagcagttaatatgcctcttgaataattatcttcaatgcgatttctcatggtttttaattcttcaattgtatatccgtgctttataatttcgaatggttttctacacataataaatttctccttataattgcataattgtatatacatagtataagaatctttattttatttattcagcataaataaaatttccgttgtgggtatctatatatggataaacaatttaagaacttcatttatactttacaataaatacaatactagaaagtagaaacatttttttgcgcagcaggcatttaaaaatgagctgttaaaagtgctttattgtaggttgttctacttgtgcttgtcacactgaaagtgggaacaagcacaagtggagacaacctgcaatttagcactttcagcgagatttttatagtcctgcgaagtaataatgtttttactttcggttgtctatatgcataagtctaattcatacttgggttatctatatcacaaaaaaagagctcctctttaaagaactcttttttatctagatctctaatctagcttaattgaattaaatggctatactcgtccaaaatagaatctaatcggtcgcttgcaacaattacctcaggatcgaacaaatcaactttttcctttattatatttagcaggttttgttccatctcataaatttcactatctattttgtttatagaatccataattaattctcctttatttattaatatatttaagaagcctttatattttatcagataaaccagtaggttatattgccaaagttgttgcataaggagggtttgcttgtattttctactggtttattttaatttgttttgacactaatatattaaccgtaaatgacacttatactctttaaaaatattagaaaaaatagtattaatataacacgttgcctacgtttagccaattttcaatataatatgaaaaggaaaatctagcttatatcttaaaataaccgattataagtacccattaataaattcaagcaatatatcctaaaaacctctatttttactaattataacttgaatatatattacaatgtttcataaactactcttgatacgagattcaaacttattaaattgcacccccggccattattcttctcttttaccagccccttattaattaaggggctatttttattaaatcttatattttaaaatttatagaattgttgtttaattttgaatattttattcattttggggcaagctatttccatattaattttatgaaaaggggaattttaatgaacaaaatgctatttcaaactcgcagagaaagaattatatcatttattaaactactaaataaagatcttgatttaagttttactgaaaaggaaatcgaagaagataatttcacacatatgcctaaaaagaataatgtcatcccatttaaaagagttgaataataatgtatctatatttattgaagtagtccaagatatctaaatataataagcaaaaaaagagtgccaattgttgtttcttatacgctaaaaacttaacaacagaataatcactcttttttaatttattaaagaaatattttattacggtaatcttctgaacatttcatttcctttaatcgttctattacagagctgtctccccaaaaatgcattggaaacactttatctgtatcagtgtttttcatgaaataatcaaatcctaagtaaaattcttctccctgcctagggtctaaaactacaaatgcagcatcaaaatgtctattcttgatcttattaatttcttcttcaaatctttctcttgcactttcattatctttttgatctcttccattccaccaccatagattaagatctcctgcatgatagattgttttatcttctgctgttacaataaacgctacgccctcatctgtggaatttaaagtctctattttcaaatctgatatttcaagagttttattaatatctataaattctattttttcataaacctcattatcaacaccatgagtattaaaaaattttctaccaaatttctttttgatatcttttgaaagaatatacacaacatttggatatttatttaataactgaaaaatatctatattaaaatggtcatggtgattatgacttgaaaacacatatattgtcttttctggatcaaaatctggaagctgacctttaaaataatcaaatatcaaaactactttatcaagttcaactgaaaaacagctatgttcaacatatgtaatattcatttgcatcatccttttttataaatttcatctcatattatacatccacaggagtaatcttcaccaatttaacttaaataataaattctttaagacaagcaaaatcactggcgaatatattttattttttactctctatcaaaccttaacttactaatcttaaataaatcctatcataactactataactatcaaaaataaaactgctaatcccgtaaccaatacctttgctttaagcattgaataaagtattttgcaaaactcttcttttagaaatttagaaaatacacttattttttctttgtagcttatataaagaagtattaataatatagcgattaaaactgctattaataaataccattttgatatttcattatatttattccagtttgctccaagaacccttcccaatgatataaatgtagtagtccatattactgcacctaaatatgcactaactgcaaacttcttatatgataccttagtcataccagaaaagtaacctgtaatatgccttattcctggaataaaatatgctacaataagcaatataccaccatatttttgataccatgttgaaatcttatccatcctatttttatttagatgaatatagcatccatatttctcaattaattttatttctaatgccctgccaatgaaatatgatatagtaatacctattatagccccacttgtagccattataatgctgagcaggtaactcattttattcatataaacaacatatccgcaataagtcattagtgcttcacctggcaaaggaaatgctattaattctaacactaaacttataagcactactatatatccataatgattaaacaattctataacatgatccaatactctcacttccacggcttaataattttctgcatacttccttagcaataaatcttatcttaattccccatatcttaaggcaaaatccgaggtcaatatgatttatttggaattaatgcatttattatattactaattataacctcttttcatttattttgcatagtttatagataaacattatctagcgtctaacctgatgtatatgtcaaattcttaaattggatatataggtaaatagactattaaatatgctcattagataagcatatttagaaagttgaaaaaactttaagttcatctcttcactagaaatcataaatatatttgtggagaaaacatttgaaaatgagctgttaaaggttcttagctgtaggttgttccattttagcttgtgaagtgagagtccaaaattttattttgggttctcgaacttcctcagcgaatgtaatgagtcgagcttccctaggaaagttggagcatgctaaaatggatacaacctgctgcttagaaccttcagcgatattttcatagcttttcggaatcaaaatatttatgatttcggtaagtcagcacataaatctagtttgagattttgatatccatataatcatttagcatatatgcctttaaaaattataaaaagccaacagaacaaatataacaatgttatagtgctctgctggctttttaaccgcaaggggatagttattatattgcgaagaaatggctttctgttattctatgttactaattactttaaaccttgttcgtagctttcaatcatgtgtttaaccatgtatccaccaacgtatccattttgtcttgaagataaatttcctttatcttgattttcgtaatcatgtaatcctacttctgaagcaacctcagtttttaatctgtttaatccttgttttgcttctggtactactgttctgtttcttccactattgtttgatgacatatacatctacctcccttaattaatattttgtttgcagtaatatattaaccagtatgataaattataatctataaaaatattaacaaaagtagtacagatagcttgtattagataactttagataatcttatgttttactttgaatcctttaccatcatttatgatatttattcctaaaatatcagtgaattgcttaagacttttcatattatttataaatttagcattgcctttagcaatcactttttcaattacttctattatgtcttttttctgagcagaacttagtctcatataattacttaggcactctctattaatataagttaaagtagtccatgcctgttcctctgatatgctatttacatccattaacacccatgtaaaatcttttcttctactattttcaggatatgcagctttaaaaaattctataaaatgatttattggctttggatctttttctttaacatactttccaagttgtgattttaaagcattctttaaatacattattgtattaggttttatagaatcctttaaactatcaattttagcgtagatataattatatgtatctgtaatctgttcctcacttgcatttcccttttttaatgcctttgttaaatcaatgtattctaagatactttttttagagccaagttctttattgtataacttttcccaaatttcatgtgcagttagaccttcaaatttatcgttaactaatgtttcatctttatccatatatgatcctctctcttttaaatatattaacttttatatcttaacatagtttctacaacttatttaaaataacattattataatacagtatttatagccaaattcctatagaatatattatatatatatttatcgcaaaaataattcttcatcataattctaaaaatattgtaagaattttagctgtaattgtgaattgtaaaatgtgcattgtgagctgcaacatatatatgaaaaaatactcaaggcaaaatatatataaatatttcaccttgagcatttaaatttctattattaatcattttttattaattacgttgtagacacatctaaattgtcatatgcacgatttagagtatatcctcttcccccaacttccctaacgtctgatactgttataaaagcgctataatcaattttattaacaatattttttactttttgcagcttttcagctggaataactgtgctgatagctttagcttcaacttttgagtatcctttttctgcatgcaataaagttactcctgtatctgcctctgagataatagccttttttatttcatcataatgatcactcataataactacttgtatcatttcttttccaaaagttaaagtcttatttaacataaaataagttaaaaatacaacaaccagaccatacaatacattagtaacacttgaaaatgtaatttgcaaagttaagatgcacaaatcaattacatttaaagtgatatgaactggagtattaaattttttatttattataattcctataatatcaattccaccagatgatgcatttgcttttaatataagtcctgctcctattcctattaaacatcctgcaaggacacatgataataatatatcattgcaataattatgcaaattttgatgcttttcaaaaaagtccaaaagaataggaaataaaaatgttgatactaaagtagataaagcaaatttctttcctaaaaaaaataatgccgataaaaataatgcaatgcttataatgtacacaactattgtcaagcttgctccagtaaaattatttatcactcttcctaatcctgtaaccccaccaacaataatattattctctaatattaatgtgctaatagcaaaagctattaatatatttcctagaagaatgtaaactaaactattgatttttcctttcatgttatcaccccaagacacagaataccataatacttgaaacaagaatgtaatctatgttacaatctcataaaagaaggtgaaaaatttggataaaataaaaattccagaggaattatattattattttgaaaaagttggaaaatcgttaacatataataagaatgatattatctatatgcaagacgataacgcaacccatttatacttaataaaagctggtcgagtaagagtatattcttcttcaaaagacggtagtgaaattacaatagagatagttgaaaaaggtagaatatttggtgaatcttccttcattcaaagttcaaaacagcctactacagtaagtgcagttaatgatgttgaattgatttcttgttcattagaagatctgtatccttacctgactcaatcaaaagacttgatgattctgctttttcagttgctttcaaatacatgtaatcatctttcaagtctgcttaaccaagcttacttttataatcgttatgaaaaagtagctaattttttattgcaacagacagctgttcccaataaagataaaaatataagtgaagattgcattccttattctcatgaagaaatcgcttcttgcattggtctaaatagagttacaaccaccaagatattaaactactttagcaaactaggatatattaaactaaaatataaaaaagtaataatactagaaagagaagctttaattaaatatgtagagtagaaggctagaattatcttaaaaataggctatgctttaatataatgttgaaatatagcctataaaaattataagtgagatttcccacctacaatacttaatatatatgaaaattatgaaatatttatatatatgtctttaaagtgtaattttaaatatttttcctttcctatgaaataaattattatcactataacttgaatattctcctacttctatccccaaacgattatacatagaaaataccttgggatgacttgattttaaataaattgctttataatgtttagatttataatattgtattatgttcttcaaccacatttctccatttcctctgccttcttgggctatatgaaaatagttgaatatcaaaatgtctttatcttcttcgtttatctgtataggttctttaaaaaacgtcttataatcaagaatgccactactaacaagagcaacccctaaacatttttcgtctttcttcataatatgaaaatccatattcatattttcattgctttttacattctcaattaatttacaacaatgataaacttcattataatcatcccactcattttccgctttaaacagtaaattttgtattattggtgcaagatattcgcttttaaattcacttgaaactccaaaattaataccattagttttgctaataatcttcattaacgaacctcctttttaaataattctcttaattaattgctattgcttacttgattatagttttttttataatacttactataacataatttacaaaataccacacatgctatacatacattggctttctatttttttcttaacttgtttacctcttttacgagagcgtcatagcatattagaacgttttgtgcctttaaaactttcagcaaagaatacttcatctgcttcaataacatcatcaacgtatcccttacctaaaaatgtgcttatacaatcaagaacataatatctagattagtaacaattgaaaaggactatggacaatttgagagtggactttaatttagaatcctccctagttattttaaagtatactatttcaaatctaccatgaaacaaaaaaagaatgtagtagatttgttgtacacaaatctagctacatacccgaatattgtggtatatagattctttcataattacaaaacaataaaaatctaaatcactatactgtaagtgtataacatttactcctttctcatgcctgcaaatgtctcattccactcttcgatctctacccttttatacaaattgtcattcacataaattgctacttcatcatgattcgaatcttctatctcttcctcaataaaaaatggcatcactataggaatgcaatactccccttcttcttcaggcttacgccccattttaataaaaagttctgctacgcctggatcttttatatgcacaatattgcctggatacgtaccaactattttaacttcatcacatggcgttggcatctcacctgtcacaaatatataaattatcccatctcttctatatgcagtagctttttctaatgccctcatcattgttctgtatggacttatatcaaacatatctttctccaaagaatttattaacaatttatattatgaatataaatcttaataggtacttataatgaatatttcttaataaaataccacaacattcatgaatattgtggtattaaaaaatatttaaatgttatctaaatcattaaaatatctgctcattttgctcatagctaatttctttgaagctcctgattttcgccactcttcaacctgttccatagcctcattaggattctttcctaagccaacaagtacacctgataatataaattcttgatacaaatgttcagagttaaccccttcttttgattctgttaaagctcgattaactagtggagaaatatagctaacccactcatctggagtaagatcatttgtgttatctatattttctgtaataactgtatcttgtctcattaagcttctattcataaatgaattattttcaacactatttaatgtaaatagataattgtattttgaagcatgttttaattcgtctgtaattatatcaaataatacatccctgtaaactccttcaggaagtcctctcctaatagctctatatctttctactgctgccagctctccaaataaagctttcttaataccttctaaatatgattcagggacctcaaaattttcttcttcatcccccattgtagcatccatatcatctgtaaaatcttcatagatccctctaaacaacatattatgtctgcgttcatcatctctaatagatgatattatttctttttcttcatttgttggtgcttcagtaataagataatcataaaacaattcatcttctctttctccttgaattgctttttttaccccctgaattgctatctgtaactgatcatcattgttcatctgatcattattactcatttgattattattgtcttccataaaatattattgattctcctacaaataattaactcactttcattgtattaatttataattcatttgtgcattaagattcataattccctagctatgccaataatataaattatctcaattcatgatacttatcacccacatttccatgtggtactagcagtcaataaaagttactttaaaaaacaaaatttatatatgaacctattttgaaatataattcagtttaatattatggtataatttggtttacacgacatgtatgttaggagttattatttatgacaaacaaaaagaaattttcaatattgtttttttcaactttattaatattagctttaggaacaggatattacttatgccatcaaactggaactttgaatagttttttattaaataattataacaaagaaaatattgaacaaatagagattagaagtacagtttcgagagaagataagtcaattaaagataaagataaaatcaatgaaattttagctaatgtttccaacataaaattagttcgacattatggtagtacagccaataaaacaaagggtgccatttatattttcatttatgataaaagcagtattaatactgaaattatcatacaggggaaagaatatattaatattatcaatgactatgataactcaaataaagagtataaaatcattgataatagtttagatttaaattatataaatagattaatttcataaaaaatcagcatctaagaccattaaaacttgtttttaggttcctgtaaatttctattatttctaacggattaaagtgtataaattaattttagaaacatcttatactcatattatttcagtaattctcatactaattactataaactatttgcaagtaggtgcaataatgacatttatagataatcttagtccagaagatttattaatcttaacaaatgcatttgccatttcattttcaaaagataaaactgctgatgaaataaacgtacttggaaatttcattgtaggaataggatgcttaatgttaacaattgcatctcaacagcaatacttaactattttacaagaagctagaaactctaatgctacacaaaacaataataacagcaacaaccgtaataataataataataataataataataataataataataataatgcagcagctgaggatattactatcggataaaaaatcaggcatacattagtctaaaattagcacgcctgatacataagctgttgtgttattccattataaaattcaaattaactttctgtttctgtaaaatcatctactgggaatattattccacctttatgcctagcaattgtttgaacttcactaactatcaagctatgatctagcattttataacatctttctaaatcattatttttgatagcttctgagaattcaatgaactcattaaccatacggtgctcataattattttcatttacttctgagctagttccatcattcataagtaattcaaatcttttacaaacattggctggagtgtcttgatatatgcagcctttatctccttgaatattatttgctataggtgccttacaatcttttgcaccaacacaaacacatttaaattttccataatctaagattaatacacctgatgtgtctattcccctctcaatgtttggataatactcaacattttctggtttaccaaacaaacctactacataatgaatattataaatatttaaatccatcaatgctcctccagagaatttaggatcaaaagcaggcaataccttcccctctttaaagctgtcatatctgctagagtattgagaataattacactgaacaatctttatattccctaaagtcggaagcagctcttttatctttttgtagtttgggaagtattgattagttatagcctcaaataagaataatttctttttcattgctaaatcacttaaaattaatgattccttatatgttgatgtaaatggcttttcaactataacatttttatcagcctctaatgcctttttagcaaattcaaaatgtaaattatttggtacaccaatataaattatatctaaatcactatttagtagttcatcataatcacaaaagaccttcttaatcccatatttatctttcaattcattcaaagtatcttcacttcttggagtcccgcaaatagcctctaattctatatcttgcaaaagatgactaattgaaagaaaatcctttactatcatcccagctccaacaattcctaatttcatattaattcctcccttttactattgatatctctttagtaaccttatcattagatacctaatatgcttaactaaacttaattttctttttagtttttgcttatttactaaaatatattttctctaataattgacttagattcttttatttgttagatatcatagttacttttaatagcattataacctataaaattaatttaatcatcccaaatcaaaccaatttcttatcatgatagtatttgaagtaattcctttaacgaatgtatttcatagttaggagctattgacgattcatttactgttccctccttgcaaagccaacaagtgtcaattccagcaagatttccacccttaatatctgatgtgatagaatctccaataactaaggcttctgcctcattgaatcctttaatatgatctttgacatagttaaaaaattcaattgctggcttattagcgcctatattttctgatataaaacagtctttaaaatactgtgaaattccagcaccatttattcttgaatactgtgtcttggcaattccattagtaacaatatataaagtatacttttcataaagtttactcaaaacctcatggacatctggcattaattgcattccttgatttaaataatatctataggtcttctcccactctccaccatctatactcttcccatacttagacattaacttagagaatcgtgtatttagtacttcatctactttaatcttcccaagttcaatatcagcccacatgccttgattcatttttttataaacttcatacaattcttctgaatatatttcacccttatctctaattaaactcttaaatgattcttcttcatttgcgtcgaaatcaagtaatgtattatcaacatcaaataataacgtattgtatttcatttcataccgctcccttcccttttatagataacacaactaagacctcaacttatgcatataactcgccgaaatagtaattatgctgttgttccagtttctaaggaaattataatggatgattctaagatcacaagttgcacccaagatgctagcctcaaaggcgagcgctcacagagaaagttcgaagaacgaaatctaaaatttcgattctcactttttgaactagcatacttggaacaacttttaatctaagaatcaaaaccatcaaattcctaatgaaacatttcatattatgacccttgtggttacaaaagcataattattatttctagttgagatatatttgatagtataaattttagcttataattgatttatctatatatgcctaatttacgaattagatatatatagattgaaccgtacattatatatgcaatagattagatttattatatagaaatatttccgtacttgctatatctaaatgattatcttaactagaaatcataaatatatttgttgaggatacatttgaaaatgatctacttataatcttcagcgatatcttcatagcttttcagaaaaaaatgtttataatttcggtaagttaccatataaatcaagttgtttatttgtttatctataaaatttcatcattccctatttatatagcttaactatttttaatcattttatcaaactctcttataattgtgcattatctgctccataaactttcactattagtttatcaattttatagctaaatagctcaataaatatacctattatatgagcatatttacaagattactagaagtttaagttcatatcttcactagaaatcataaatatatttgtgaagaaaacatttgaaaatgagctgttaaaggtccttagctgtaggttgttccattttagcttgtcaaactgaaagttggagcatgctaaagtgggtacaacctgctgcttagaaccttcagcgatattttcatagcttttcggaaccaaaatatttatgatttcggtaatttatcacataaatttagttttaaagttgggtatcctatacagataaaacaattataatatataatttggtcaattgaaattactaagtgacgaagtgagtcgactttcattctctatttatatagcttagctatttttaatcattttattaaaatctattgcgcccataaaaagagtattatctagacctctacaaaatttacactcatcttactaatttcaaatataaaaataatgccaaaaaatatcgcaagattattcttgtttgtttacatatatggtaatataatacatttaaatgcaaatacattgcaacaaggagatttatatgaaaacacaaatagaaataatactaggattcttacagtctggaaaaactaattttataaattccatgcttaaaacttgcgatttacaaaatgaaactattgttgtcatccaagatgaatttggacaaagcaaaataaaaaatgaatttgttaattcaaatgaaaatataaatattataaacattgaaaatacttctaatgaagaaattaatgaaaaatatataaacaaaattttagaattatattctccccatagaatatttattgaagttaatggtatgaaaaattccaactctataattaatgtgtttaataataaaaatttaagaaagttatgcagaattgacgacatcgtaaccttaattgatacgaaaaagtttttcatttatttcagaaatatgaaaagcatgttaagtactcaaatctataatagcaagacaataatactaaacaatataaataatatcacaaaaaaagacttcttaaatattcagagtcaaataaagagaattaatgaaactgctaacttattagagcatgcgccttcattaaatattaaagaaatccatcaagacgaatatagagaaattagtagtcatagtttttctgcaattaaaactatgttttatatgagccttctaatattatcatttacgtgttttgctgcattatctattgctgatagtagtggatattcattttatttggacaagtttaaaaatttttatactgtatttattagcatattaattcaaggtatcccatttatcttagttggaagttttgtatctgcaataatacaaatttgcatcccaaaggatatatttattaaattttttccaagaaacatattcttgtcatgtgttattgcagctcttgcaggcttactcttcccaatatgtgattgtggaactattcctgttgttaagggccttataaagaaaaaagttcctatagctgctagtattactttcatgttatctgccccaatagtaaatccaatagccataatttcaacaatatatgcctttcaaggtatgaaggcggttgtaatttataggattgttgcaggcataataatctctattctagttggtttaattatgcattttctaactaggaaagatgatgatatattaagtattaataatgatggactaagttgcgaatgcggtttttgtaatgatgactatgattattcaaagaataagctgcaaaaaatcagagcagtatttattcacactggcgatgaattttttaacataggaaagttcatgatcattggtacatttttatctagcatctttcaaaatataatatctgccggtagtaacattcctattttgagtggtaatataagccctttaattgcaatgatattattgtcttttgtgctttcagtttgttcaacctcagatgcattcattgctaaaggatttttaaaacaattctcagttaactctgtaatgggctttctagttgttggccctatgcttgatataaaaaatacaattatgatttttggaaacttcaaaagaaaatttgccataaagctaatattctttattgttgtagtatcatttagtattcttattaaccttagactatagaaaaccaactatgcgtatacctcaccgaaatgtataatatacttttgttccagtttctaggcaattctgatgggtgattctaagactataaagttgcacccaaagtgctagcctcaaagaacaagctttaaactagcacatttggaacaacttatagccaaagaatcacatccatcaaaattaccaatgaaacattccacaaaagtatattcctcatttctgcatgctccaaaagcaagtttaggacaagcagaaaatggaacaaccttcaactaagaaccatcacaactcaatttcaaatgccactttcacaaacttgtatctaatttctagtataattcacaaagattaaagtatgagtatatattttggtttggatatctatataaccactaatgaattcacaactctatggattactaagcaatgagaagaattttagttaatagcatataatcactagaaggcgcgtacagatcattgacctagattcaatatattagtaaaaaatgtgtccataatattaacctaagtccacagatctatgccatattagaatactagaatattagaatataagaatataagaatataagaatataagaatataagaatataagaatatcctcttatcttaggcaatatattttatcttaagatactctttaatttgatatggagatgaaaatatgaaaaaaattaatgtggaagtagttgcaaaaatattaatactattaggattttcaatattctatttaaaaattattgtaagtaatgaaattctcaaatatgtacatccaagaattatcccctttgcaatctttggaatgatttcaatgttcataattactttatttttgatttcagatgtcttttataataatagaaaaaaatttaaaattaagaatcactttatctttatttttcctttgatcatgataatttttatgcaaagtagtagtgcaaattctgccactaaaggcattgatacaaatggaaagcttaacgaatcatcatctactaacagctcttccaataattcaaataacaactcgccttcccttaactcaacatatgaattgtatagtggaaaatccgaaagtgatggtcaaggtcaagtagataagattcagctaaatattgtgaataatattataaaagtaaacattaataactttgtatcttctcttgatgagattttaggaaaccctaaaaaatatgaaggaaaggaaatagagatttcaggatttgtatatagagataaagatttaaaagaaaatcaatttataattgcacgatttatgatggtgtgttgtgctgctgatcttcaagttgcaggaattgaatgttctagcagtgattcaggttcctatgataatggtacgtgggtaaaaataaagggcaagatcaaaattaatacttctgaagatggaatagatccagttatagctgttgaaactatagaaaaagatcctgctcctgacacttcttatgtttatccattttaaaatatattgctaatataatttccaatcaacataatttctatgtaaaaaaatcataatgaatataaaataagaataatctaacatagaaagttaggttattcttattttatagctctaaaacattgatgtcacatttccagtaaatttatctacataataccatccgccagttgttatatattctcctgatgtatcatagcaatgaattacataagagttagactcatcatgatcatattcaattttacttggaacatattttccattggctagaagataatcttttactttctctacagcttcaatagttgaaatctgagtattagtgttatttatagtaatattagaattaagcagtgttgtaattccttgttttattttatatacatttccattagaagagtcatagtaatattcaccaatattgtttcccacttgatcttctgcagagaatttatataaactcttatcacttaatcctatttgattaatgaatcccttattctcatatttaatagttccagaatcattataaatattgattatatcatacataacctgaatatcattcggaacaacagtagtagtcttagattcttcccaagctccactatcatttagataataccatttattattatcattaatccatcctgtttccattattccatcactatcaaaataataccagttaccatcaattttatcccatccaactgagtaagcttctcctttagtaaattgccatccttgaccgttttgtttccaatatgcattagctatagtaaaattagtaatttgtattgacatgatagttaagattactaaggacaactttttcactttattcattgccattcctccctacacatattactattacaccttttaccatgtgatgtcaataattctagtagaatataataactcttaaaaaaggaaaatacacagatatctgtttcacatattatatgttgcaattcacaatgcacaattcacaattacggctaaaattcttgcagtatttttagaattatcatgaagaattatttttgcaatatatatattattttcttaacgcttttaaaacttgtactcagatttagcttgccacactgaaagtgagaacatactaaaatggtgaaacctacaacttagaatcttcagcaatattttcatagtttttcagaattaaaatatttattattttgctaagttaccatataaatttagttttaaagttagatatctatatagataccacaatcataaactataagtaaactatgaaatatcttctaactagaaatgagtaatatacttttgtggaatgtttcattggtaattttgatggatgtgattctttggctataagttgtcccaaatgtgctagttcaaagcttgttctttgaggctagcactttgggtgcaactttatagccttagaatcacccatcataattacctagaaattggaacaaaagtatgttattcatttcggcgagacatattcataaattcgggtcttaattggggtatctataatttatagggcaaaagcaaagcactaagaattttcttagtgcttcactgttatttattaaagtccttgttcatagctttctatcattctttttaccatttccccaccaacgctaccgttttgtcttgaagaaaggtttcctttatccatgctttcataattgcctaatccaatttctgaagcaacctctgtttttaatctgtttaatccttgttttgcctctggtactaatgttctgtttcttccactattgtttgaagccatatgaatctacctcccttaatttttgattttgtttggcagtaatatcttaaccattaccacaaaatataatctataaaaatgttaacagaagtagtacagatagcttgtattagttaattttagatattcctccttaaactataacctcatatttatttttaataagtgctttcatagcattatccacatctttttccttaacaagtatataatcagtatcataagtggaaattgcaaatatgcttattccgcttttcgctaaaatcgtactaattgatgaaaggattcctactaaagaaaagtccaactgaccttcaacctttaaaattctccattctttttcgcatttaacttcattagggatatctttttcaaggcacactattgataattcgtcaaatgtttttgttatagaaagaaaatcactgttttttatccatccaggaattgattcattgttatttaacctgcacactccatatttttcttctaataatctaatagttaatattttttccgacatatctttctttcatcctttcttctcatttctaaaacgccttatttatctcaaatttatagtttaaaatatataaaaagaaaaaagccaatagaaatattattaaaatacctctcaggcttttatccttttgtaaatacaattaactttaaagtttatcttagaactgctaatcatgttgaactattgagtcaaaaaaacaattcagccttaattattaaatgttaaaattattcatatattttaacataatgtaaaatttggatcaacatcacatattattatagatatcataattgcgaattttaatttatgattgcactaagctaagtgtttattttttcctaaaatgtataggatacatcggaatctgaatacttgcttattcaaaaaaattacattaactttaattctctttaactatccatagtttcaatatgatagctaattattaggtaatactgaaattggaaatacacgtttctttattttatatgcaagatcaagtttagtatcatcgtctatttgactcaatttataattccatactcttgtattttcatctacatcttcttctgcattgcaacctataatatttcctggcacttcaacctcattaataaattttatatttttaatataactatatattttttcgtcatcagtattatttttaattaagttatctattgcagatttattgaattttacatcaattgtatatacatcatcttttccttttgttctttttaaatcagtcattgttgctaatccacttgaatttattttttcctctaattccttaatatctttaaactcataggtaatttcttcaatgttcatattatctttaaaatacttattaaatttatatccattttctttggcccattcatgatcaatcacatcattttctaattttgttgatataaaatcatcatatacaacttgcagttttacaatacctgccccattttcatttattacagttgaacttcttaaatctatatctctacatccaagtaacataatacctaatattaatataagtgaattaaaaattgttcttttcattttactcattagttctcctcctagatgcatatttttctatactactatagtacccaaagatagattgtatatgcataacgacattacgcttacccacaattccatacaagctcaagccatccccctacctctttattttaaggcattctagctaatttcaggctcaaatttatactaactttgaacataaaaatattatccaaattaaattacttttaaaaataataaagggtagttaacgaactaaaatcgcaaactaccctttataaactattttgtatgtaggaacttttcataactctctattttatcctctctgttggtattctttatccagttattatattccaagataactttttctattgttgttaagtttaatttattgtttctttttcttttcatttctgcatacatattaattttaattatatttcccatctcattaacctcctttctatataatataactttgatattaattttgtgtatacaaaaatattaagaaatagttaaaatttaattatatcttttaacgtagctaattttaaaacgatctttgtatagatacaacaactacagcctatacttatgcgtatacctcaccgaaatgaataatatacttttgttccagtttctaggtaattctaatgagtgattctaaggtataaagttgcacccaaagtgctagcctcaaagaacaagcgctcacagagaaagttcgaagaacgaaatataaaatttcgattctcactttttgaactagcacatttggaacaacttatagccaaagaatcacatccatcagaattaccaatgaaacattccatattatgacccttgtggttacaaaagtatattactcatttctagttaagatatacctcatagtataaatctaacttataattgaattatctatactcaccacttatatcttgttactaatcaagatattatcttttatttacaaattataaatcaagctgttggttggtttatctatcgctccctatgctcaaaatcccattattatacctattcaagttaacttaactttgtagcatgtccattctcatcaaagcgatatccgtatatatctatattggtaattaactcaccagtagaataagttagataatcgtatccacctacattaaaccatccagtaaccatggctccatctgttccaaagtagtaccagttaccatttattttctgccatcctgtcttcattgatccatcactagggtctccaagataataccacttattatttttcaataaccatcctgatttcattgatccatcatctgaatttcctagataataccaataatctccactcaacttccaatcataaagcatccagccttcactatcaaatagataccactttccatttattttttcccatccattcttagtataacttccatcagtgtgcctataccaccacttattatcctttataatccattgacctggtttagtaacattacttattaaaactccgtcagtaaacgaatttatgtcacaatcttcgcttacacctcttactctgccagtttcagtatattgatgtcccactctatttgtaaagaaatttgatggcaaattccaaggattattgttatagttagcctcccagaaaggcatatcctgtataactgattttacgttagtaaggtaacttataaaacttgtataactgtaaatgcctaatgggatagacgttagcttgccaaatgcagtaataaatcttgtaacataatccgcaagtccgctaaagttagtttctacatccatcataggcactaaatcccaattataatcttttatcttattataaaaattctgagcttgcgcttctggagtacttgtcccaactaaaaaatgatatgctcccacttttaagttgttatttttgcatccactataaaatagttccatcttactatctctaaatgttgccccttctgttgcctttaaataaacatattgaactccatctcttgcaacagctccaaaatctatatttccattgttattcgatacatctataccttttatataccccataattcatactccctttcgattttcatatttataaagagtaaccctaaagggttactctcaaatattcagttactattgttccattaacttattgcttttatttattttctttagaatctgaagcttggacagtttctgcttcatcttttgtagtttggtcgcttaaacctggcgtactagtatcaactataattcctagcattgttaagattgtcaaaatagtattaacaatttctgcatagttattaggaattatatttaaccccaactgttgtactaataatgctatagcactagccattgcaacccaaaaagctttattttttaatcttgcttgaagatcaatacctaacatacctatcttcacctctcttcttttatatatacataatatgaattaaaactcttaatggcgacttaaaattgaactaacagtacgaattctattttataagtggcactatcactcattactttaatacctcttagaatatatatgtttaaaaatatattatgaatgccatttttagaatctatttaaaatttcaatctaagtaataacttaaatttttgttaaagttatttatttaaagaagggacaatataatataaatctcaaataaaaatagagataatattttactaagcatagaaatactatccctactttcagctgaactaattttattgtgatttattttataatatacactcaatgctcgttatctttgcttttcccgtaagcggtttataaatcatcactttggaaataccttgtccattatgtgctgcaacctttgacttacaaataaaacaataatttgttccatttacgctctgagtagctaagattttaggttcatactcaacaccaattaattcacttaatgctgtcttaagcacatttatatcatcatctgttatgttattgtgaactttccatcctcttgatatcttcatagaattctcctctcatttatatccccttaaattttggaaaacgattatataacattcgatttactatagcatattcatattattcgaattttttaactaattcccaaaagaaaatttagaagtgcagcaaatttgctttaaaaaataaaatatagaaaatcaattgtaatatgcattggtgattatagatatccgacttcaaatctagatttatgtgataacttaccgaaatcataaatattttgattccgaaaagctatgaaaatatcgctgaaggttctaagcagcaggttgtatccactttagcatgctccaactttaaaaatggatttatgtggtgatagaaataaataataaaagaagcgtcccaaacattatgaaacacttctctttaactattctatttaattaataataaactctctaatgctgtaaatttactttcctcataacatctttcatagtttgcgctccatgtttattaataagatctttaactattgctctatgaaattcctttatagttttttccttcaattcattatcacaaatagaattgtaatcaactttattattcatatttttctctccttttgacttatattcataatgtgcataataaataatattttatacatatatattgcaaaaataattcattataattctaaaaatattgcaagaattttagccgtaattgtgcattttgaattgcaacacatatactttgtttgaaaatatttcatatacactatgaaatgttctttgaagttaaaaggagagctttaatagctattatctataagaacctcttttctaaaatataaactgctttctataaatcttttccattagtagaaatgacctctttgtaccagaaaaagctctttttcttactacgctttaatgttcctttgccttcattatctttatcaacgtaaataaaaccatatctttttttcatttctcctgtggatgcgcttacaagatctatacatccccatggagtatatccaataagatcaaccccatcaatattaatcgcatctttcatcgctttgatatgttcccttaaataatcaatacgataatcatcttccacatatccattttcatctggagtatcaacagctcctaatccattttcaactacaaataatggcttttgatagcgatcatacaaagaatttaaagtaattctaagcccaagaggatcaatctgccacccccattcacttgcttttaagtatggattttttagcgtagcaaatacattcccttctgtttgtgcatttatttctggatcagcactagtcaatcttgatgcataatagctgaaagaaataaaatcaaccgtattattttttaataatttttcatcctcagcttccatttctaaagtgatgctcattctttcaaacatcttctttgcatagtttgggtattccccacgagactgaacatcaataaagaaatagttttccctatccttctccatagctctccatacatcttctggattgcaagtatttgcataggtattaccagctgcaagcatacaaccaattttaaaatctggatttatcttgtgtgctatttgagttgccttagcacttgcaactaattgatgatgtgctgcttggtactttatagcttcttcattttctccttcttcaaaaactaatcctgcaccaatgaaaggcagatgtagcagcatatttatttcattaaaagtaagccaatacttcactttgtctttataacgttcaaaaattacttcacataatctttcataataatctatcattttgcgacttctccatgaaccaattgtctctacaagatgcattggtacatcaaagtgagttatagtaactaatggctctataccatatttatggcactcatcaaaaacattatcataaaattttaatccttcctcgtttggcatttcatcatctccatttggaaatattcgtgcccaagataaagatagacggaaagtcttaaaacccatttcagcaaataatgctatatcttctttatagttatgataaaaatctattgcttcatgacttggataataatgttcttcatcgcatttcatcattttcatctttccaagcatcactggaaatctgtctttacctgctggaattacatcaactgtagataaacctttattaccttctaagtatccgccttcacactgattcgctgctgtagctccgccccataaaaatccttctggaaatccatttatttctgagttatcattcatcttgttatatcctccatatgtttaaaaatattataaaaataaaacttcttttcgttgtgacagtaactttattagttttgtgatacagtaatagtttgagacaccgtaataggtttcattcctgtttgagatttcgtttctttatttaattgctggtcagagagccattccataagcgttgttacttttccatttattattgctgaacattggttattatatacgtatatccatgaccaatgacccatatattcatatggtgttccatctgctttcttatataggcctgtagtatcaattacattatcaaaaaatgaaaaatgaacatttgtatcacctgcttgcactaaacgattataagttggaactacataatcagctggaggtactgttgtatctgttttagctgctgtaaaccaaattggcactttcttaaacgcttcaatgtctttatcagtaatcaatgtatcctttaacgcctcacaagttgggaacgctgctgcaaaataatcagcataatcacgtatcataagcattgtcatatatccaccattagagtctccacctatataaattctatttgtgtcaatattactattctttgagacataatctttgattaatgacataagagctttttcatactttgagcttccatctccaaaaccagtaaatccatccatccaaaaagttggtgcctgaggcgctaaaatatatgcaccattaaaatatgcttgcatgtcttttgatgcaaaatttacagctttattccctgatataggtaaaagcccatctgttcctccttctccaatgccgtgtagccaaataattaatggctttttactataatcattttccggtgtatagcttgcatattttagagtaacattatcataagttgcacttccaattttaaaatcatcaacaagctttttagttccacccacaaatttatttataaccaagccagaaattttgcctgaatccgtaacgatatcattcttctgcttgattgtaaagtcacaattaacccagccattaagattagtagttaaattatagttaattggcgaagttaaagatacatcaggtccaacttccaaatcaaaagtaatataattccctttgctttgaatatttccaatatcgtcagaaacatacgcatttttaatcttgcaatttccttctgcttctcctaatataggtgaatttgctctattctcagtccttaatacatgaacatcgaatgtgtccttagtaattgctgattgtggtatagcttgacctaaatcaacaattatttttgtgattgcaggtccccaatcaaatacctctgtagtagtacgataagatggttcctgagtcttattattatcagctgcaaaagcaccagcattaggtgtacttatcatagttactgccataataactgacataatgatttttccatgcttactaattatttttttcatttaactcccccctaatttatcatattttaatatactgggcattacatttattataaactaatccccagcatattttaaattattctccaatatcttatatcattactgttagtagctcttctttataatcaataatttttctatcagtttcaataacatctaaataactatctgaattagtaattactactggcgttattaaagaataaccttctttctctatagcattaatatcaaactctagtagtacctgtcctgcttttactgtatctccttgtttcgctttagggtaaaagtattttccttccagctgtacagtatccatgcccacatgaattagtatttctgcaccgttagcacttgtgattcctagtgcatgacctgttgggaaaaatgttgtcaaaactccatctacaggagcaaatattttaccttcctttggctctattgcaatgccttttccgagtgcaccttttgaaaatgcttcatcttttacttcggataaaggtttaacttcaccttttaatggacttactaaaatttcttgtctaactaaaggttgcactgtgtttaaatcgttcttacttttactagaatccgtattatcttcaagttttgtaaataacattaatataaatccaattaagaaacctgctatcatagcaattattgaaccatagaagcccctatccattccatttggaccaatataacctggtattccaaaaatcccaagacctcctatcatatatacattagaacccataaatcctaatattgcaccacctagtgaacctcctatacaactcaaaataaatggcttcttacgtggtaatgtaataccatatatagctggctctgtaacaccaaaaattcctgaaataaatgctggtatacataatccttttaatttactattctttgttttaagcagaatagctccaactacacctgtttgagcaaatgaagctgcaaatataagtccgagaattggatcttgatgtaatactgttaaattatttattgctataggaatgaatccccaatgtaatccaaagataacaaatacttgccagaaagcacccataaataatcctgcaataactggacttaagttataaattgatagtgttaacgcaccaagtaatttacctgcccaagttgcaataggcccgataactataaatgttaaaggaacaataactaataatgtgcaaaatggaaccaagaatgttttaactacatcaggaattacctttttaaatccattttcaattttaccccctacatatgtagctaaaataattggtataacacttgatgtataactcattaatataactggaattcctaaaaaagttatataaactggtgattcaattattgaaccagcaaataaagtatataaaggctgagctggtgatgctgtcaatcctgctaatgatggataaactaacgctgcacctattgccataccaataaatttattcactttaaacttattagctgctgtatagcctaagaaaattgggaagaaattaaataaacaatctccagttgcatttaaaatttgataagttccatcagtagtgttaagtatatgcaacgctatgaataatgcattaaatcctttaatcatacctgttgcagctagtactcctaaaatcggagtaaacacacctgatacagtatctatgaatttattaaatggactcattttttcttctgacacatcttctgatgctccagttttaaagccaccaatggcaacaacatccgcaaaaacatctggaacatgattgccaataaccacttgatattgtcctccgctctttacaacagtaacgactccatccatattttttaatacctcagtatttgctttactttcgtctttcaacttaaaacgtaatcgagtaatacagtgcgttaagctattaacgttttctttaccaccgacatttttaattatgtcttttgctaattgttcatatttcataataattctccttttcatatattaagatttcttttttattctttttaaaatacccaaactatccaagcaaccttttttaagttataccctcaaggagtacctcgttcacagattttactggaatataaattcctaatgaagaacaaagtggctgcgccacgctctttcttgataccactttttacaagccaatatccttataaccattggtatcactgactttcaaaatcaaaaaattctatactttcctagacaataaaaaagcgagaccagatatggatagatatatcttttctatccatatttggtctcgcctgctttaccagtaacaatccaatacttttattattttaatttatctttgagtcacacgttggatatgtatagttaaatacagttgctcttcatcagataattctttttctaaatacttctgtattttaagcatacactcatatgcttttttatatttggttttaacttgctttaataaaaaatcatcctcttccttttccatcttttcatttttatttagtctttgaaaaaagaatcttaaatgtgtaacaaacctttcatagttaagagatttttcattaagtgcaatgttgtaagtgtacttaattatatttaatatatcctgtatcatttttgtttgatgagcaatgtcttcgactttattgcttgaattattagtctgggcatttattaaatgaagagctatgtttcctgcttcatcttctggtaattttttattagtttcactctggattagatctaatgcttttaatccaatttcaaattctttaggataaaactttttaatctcccagattaatgcatttggacgatttaatccttcatcaaataattttaatgcataactaatatgatcagttaaagtaatatatataatcatttagttcaacacttagcatattcttggcgtattcaataatatcataacatagtgatacatgttcagtaggaatatcttctaataataatttaaatttctctgaagcatctttttgttttagtataaaagttttttcgattagattttcatctacttgatctcctacacttttcttaaagccaactccacgtcccataataacaatctcttgcttactagaatctttggctaaaatagcattattattaaatatcttttttattatcattcctatcccccaatcaaagtttatgataaattagaatataaaaaccccaattaatcaaaagagactaaggaatatctcttctcattaattaaggtttcgcctgatctagtcagtaacaatcctaatattttgtaatcgtttatccatgtttttataataacttctttactattaaatgtcaagaattttgttattattttcataagaaaaattatagtcaactgttaagcttaagatttttcatcatctatcttttaagtccacgtaaaaaatctgcacatccgaaatggcagctatgctgcatataagaacattttatgcaagcgaataagatttcttttttattttcttaatacaaaaactagtcaatcaacttttttaagttatccacggactttattaaaatataaattcctaaaaaataaaaaaagccagtagaacatttaatcttaaatgttctaccagccttacttaaccgcaaatttagatttacagttttttaaagaaaactttttctacgttcttagttcttaattactttaaaccttgttcgtagctttcaatcatgtgtttaaccatgaaaccgccaacgcttccgttttgtcttgaagaaaggtttcctttatcttgattttcatagtcttgtaatccaatttctgaagcaacctcagtttttaatctgtttaacccttgttttgcttctggtattaatgttctgtttcttccactattgtttgaagacatatatatctacctcccttaaattaatataaattttgcttggcagtaatatattaaccattatgatgaattataacctataaaaatattaacaaaagtagcatcataaattataattagaaaaaactttcaatatcttgtactaaaattcattaaaaaagtagcaatctacgattactacttttttatgtattataaattatacagccttgtctgaattttcttgattgctttcattttgaagtgcactatgctttcttccgtaaacaaaatacactgtcaaacctatagcaagccatactaaaaatccaatccaagttattaatttcaatccgcataataaaactatacagcatattattgatattaatggagtaaatggtactcctggagttttaaagattcttttaaaatctggcatagtttttctaagaactataaccgcaacagatactgctataaaacttaataatgtacctgtacttaaaaattctacaataatgtgcaatggtaaaaatcctgctattatagctgctacgcttccagttattatagttgaaatatgtggagttttatgtgttgggtgtacctttgaaaatgcttttggtaaaagtccatctcttgacataaccataaatactctaacttggccataaagtactaccatcatagtagaaatcattccaagtatagctcctgttcctactaaagctgctccccattttatgcctactcttgctaatgctcctggcactgcattttcagaaattatttcttgataaggcaccattcctgtaagtacaacagcaactgaaacataaagtaatgtaactgctgctaagcaaattataagtccaagtggaatatctcttttaggattttctgcttcttctgcagctgtagatatagcatcaaaccctataaatgagaagaatatagtagctgttgctgcaaaaataccatttaatccaaacggagcgaaaggttgatagttagttgtatctatatgacctactccaagaactataaatataagaattatagctatttttattcctacaattaagttgttaaccctagcactttccttcataccataatataatatataagttattagtgcaattattagcattgctggtaaatctactattccgccattgctaggtgatgaagttaatgccactggtaaatctactcctagtgattttaatattccaacaaatgttcctgaccatcccgatgcaacggcactacctgcaactatgtattctgcagtaagacaccatccaattatcatagctattatttcaccaaatactatgtatgaataagaatatgtacttcctgcaactggaaacattgttgaaagttcacagtaacacaatgcgcaaagtccagctactatacctgctaaaataaacgaaataattacagctggtccagccaaatgtgctcctgttcctgtcgcaacaaaaatacctacccctactactgctccaataccaaaagcagctatatctttggctttaagatttttctttaaagctgacttttgcgcgccttccagcattttatctaacgattttttcttaaaaatattcatataggtcctcctatttacttaatccattcgtcaaaaatctcttaataactatatacctctatataacatattaaatatttatctagaaattttaaaagtacaacaaatcaattaatatattatcatatttttataatattaggcaagacattaacacattaataatttatatattttttaatttttctcttaaaaaaacaatactttttaacataatattatgcaaggtcctaatataaggaagaaatttataaattaacggcgaaaatccaacaaaaattgctgcattatttttaatctatatttctaaataaatttaaacctataatatccatcattattttaagcaaatataagaataatattagtaataaatgaagaaatttattaaaaaatgccgaacttatatctcttatcattactataaaacgataagagacataagctcggcactctataataaggctgttataaatttttattgacccataagatacgccatcaattcttcccttgtaaatcttttaggttctttaaattgatttaaagttaatgctctataataaacttcagctactttttcaacatatcttcctttagataatacatcttctatatctttactaacaacaattacaccattactttctaataagcaagcatcacttgtgcttaatctttctaacaagtcttttgccggatcattagtttttgctttttcataattcgctaaatatatataaccaccataatttgcagcatcataagttactgggggaattactttattagctaccgcaaaagtggtcgcataaactgggtgaatatgcataaaagcttttatatcttttcgagccttatatatatcaagatgcatttgcatgtcactatttggttcaactccatccattgtttcaactttatttccatttaggtctacaacacaaacatgctcctggcgtaaatcttctattttaattcttgaaggtgttataattacataaccagaactttcgtctttaatactaaaacttccgattttttctatgcataagttatatttttctgcatcttttacaatttttataagtttaatttttaaattttctaacatacttacactctccttcaccataacgctcacttaatttaatcccattactttatcttcaaatattctagcatccatcaatttaagatctttatctactattggtgcaaaatccattgcagctaatatatctttttcaagatctactccaggtgcaatttcagttaaatgtaatccatcttcttttaactcaaatacagctctttctgttatatacataacaggttgttttaacttcattgcacgatttccactaaaagtaatctgctgaacagagtctacaaattttttatttgatccatcatttataatttttaattttccatcctctatttttatgtccaatcctttagctgtaaaagttccacagaagactactttcttcgagctttgagtaatgttgataaatccaccacagcctgggacctttggaccaaatttacttacatttatatttccgtgcttgtctacttctgcaagacctaaaaatgctatatccaatccgcctccatcgtaaaaatcaaattgtgttggttgatcatacatacattctgggtttattgatgctccaaatttattaccgccttgaggaattccgcctatagctcctggttctacagttaatgtaaagtaatcacatattccttcttcattagcaacatttgaaattgcttctggcattccaattccgatattcactacttgcccttttactaattccattgcagctcttctgccaataatttttctttcatctaattttaatggtgctaatccatcgactaccatatttgcttctccagttaatgaaggatcataactatatcctaatatttgagcttgatcttctttatcttctgcttcaactatatagtcaacatatattctaggtatcttcacagctcttggatccaatgttccaaatttaacaatcttctcaacctgaactaccacagttcctccacaatttttaacagcttgagctatacatgcagcctcagaataagtagcttcgtggtccattgtaatattgcctttttcatctgcatatgttcctctaataaaagcaatatctatctttggacatttatatattaaattttcttcccctaatatatctattacttgtactatatcatccttagttattgaatttgcttttcctccctctactctaggatctacaaaagtatttaatccaactttagttatagtgccagtcttattacttgctttatctctaaacatatgacacataactccttgcggtaaattatatgcatatgttttattatctctaattaatgcgcctatcttaggtgctaagccaaagtgtcctcctataactctaccagttagcccttcatgtgctaagtgatttaatcctttacttcctctatcacctgatgctgccgcaaacattaatgttagatttcttgggctattttcttctaaaaatctttcttccaaacttttgattaatgattctggaactcctagtaatgcgaaacctgatgttgccaaaacgttattgtcttttaccaaatctgctgcctctttagaattaattatttttaccataaatatcatctcctgaaaaatataatagcctttgttatttttttatcaattcctcttacctttattttaatagcttgtctattttttgtcaatctaattttctgacaattcagaattattttttaatatattattattcaaaaatctattttttattgtaatgtcttgatatcgctaacatttctgtatttttcccatatttttcaagaaaattaaaaatataaaattaaatcaaaatatttattatctaattatacttatattttatgaaagcaaccacatattggttattacatattgatatttttttaactattttttaatttattattgattaccaaataacaacattatatttcacatatcgatttaacatatatactgaaattgacaatgcacaattcacattttacaatgcacaattacagccaaaatttttccaatattttcaaattatgatgaagaattatttttgcaatatatattctccaataaaaccatttaacatttaaattctccctctttaatacagcagcaactcctttgattgttttaaaatcaaaggagttactaccatattataaaatataaaacttatattgttttctcttttgttatattatgacttacaatcagcaatatatgttatatattaagttgctctattattcatgttttctctatatggctccaaatgaacaattacatcagcattattattaaattcctttcttaacgcatcctgaatttcatgagttaacttatgagactcttcaagactcatctttgaatctgctaaaacgtgcatatctatatgcatatcttcaatagttccacgacttcttattttatgaacaccttttacacttttctgggacattgtaattttttttatcctcccagcttctactgcaatactatcaactaaaatatcgctagcagctctgaatatttcataggcagaatgaaatataaaaatagcaactacaacagaagcaaaactatctataagtggcgatactcccaattttattgcgctaatagctataattacaccgatggttacaaatacatcactttttgtatgcattgaatcagaaattagaattgtactctttaactctaatcccttcttatattcatactttgtaataaatatattaatacatagtgtaacaagcattacaattagactgaccgttgtaatttctggcctaactggatgcataaatttattagccccgtcgattataatctttccacctataaaaactaacattccaacaataaataatcctgtaagtgtttcatacttcttatgcccataaggatgtccttcgtcaataggcttggctgctattcctaccccaataagtccaatgatattagatgatccatctgttattgagtgaaatccatccgccactatacttgaactatttgcaaaagtaccaattactatttttataaaagctattattatatttgcaaacataataatccaaagcactctttttatttctttaaaattgtttttctccaaaattacacctacttttaattaataaaatttaagtaactataataaattggttgatgaattcaactatagatgactaatatattattattttttctttaggttacttcttaaaaagtttattctacatcctgcttcatcaattattttaataatagtttgcttattaattatcaattggtaatatattttatacttctatactatgttgttgttccatatatgttaatatatctagaaatatatcaagtacttattattatcagttgaaaataaattctaattgatagctcatatagttcatgatctactagttcaaatattatataaaaagaaatataaacaataaaaaggactcagaagcacattttccgaatcctttatttcaaattaatatattgcaaaaataatttttcatcttaattctaaaaatattacaagaattttaaccgtaattataaattgtgaaatgtacattgagaacttcaacatatataaccactttcgaaatctttatttctaatatatccaataacctccacacataccagcctgtacaaaaatataaaattactttaaaaatctattgcaaatagatttttagtattaattcaaaaagcattttgttaaatattctatagagctatatttatgtaatttgctatattttttatactttatcaggtaattcacttctaattttctctaggtgttttggataatcctgaattacaatatcagcttttattccaatcttctctaatgcccctaatgaagattgtactttatcccagaattcttctactgctttatttacatgatttttcaccactgcagtctcaaactcattattttccttttcaacttttctcaactgattcattaaagttatttcatcagaatctatattttttaattctacacataatgtattttttaatccaagtatacaaaaatcttcacttaatccatcttcgcctttattagaaacatatgaaatttctttaataatttttcttccagtatatccgctcgagtcttcatattcttgaaatacaataatgtctctaacactaaaatccctattgtattttactaattcaaaagttttacttccatctcttatcgctttatagttattagtagttatttttagctcatgtatcatttaaatcatcttctttctatagtgtattatattttaaaattttcgacttaaataaattgagtatttgctccatataactattgtttcaaaaaatacttctactattcttaataaaagtttttaaattatataatctctgattagtatataaataatccgccgaaagtagaaacattgttatttcgcaggactatgaaaatttcgctgaaagtgctaaattgcaggttgcatcactaatgcttgctcccattttcattgtgacaagcattagtggaacaacctacaatcaagagcttttaacagcttattttcaatgcctgctgcataaaaatgtttctgctttctagcatagtatttatttcatagtataaatcatagctatgtataagttatagataagccaattataagttagatttatactatgaaatatattccaactagaaatgggtaatatatttttgtggaatgtttcattggtaattttgatggatgtgattcttaattgaaattccaaatctatgatttggtcaattgaaattactcagtgaacgaagtgagtcgagtttcctttgaactattccaaatgtgctagttcacagcttgttctttgaggctagcactttgggtgcaactttatagccttagaatcacccatcagaattacctagaaactggaacaaaagtatattattcatttcggcgagttatatgcataagttcaggtcttagttgggttatctataaaagctggtattttataaaataccagcttttatagatatgttctaattcattacttaactttttcgataaattcatctattaattttcttgccaaagtaaactttttaggtatattagggaagttttcttttgagaaccactgcgcatcaactatctcttttccatcgacctttatttctcctgattcatactctgcaaaaaatccaatcattaatgaattaggaaatgaccaaggagagcttttataatacttgatattctttacctttattccaacttcctcaaaaacttctctttttactgtactctctaaatcttctccagcctctgcaaatcctgcaatcaaactatacatatcatttttaaatcctccattatgagcaagaagaatttcatctccttttataacagcaactattatagccggacatattacaggatacattacattattgcagtttggacaaactttggccatttcatcaattttatcttctgttctagatccacattttccgcaaaatctatgtgttctatcccaatttaatatttggttagcccttcctgctgctaaaaataattcttcttcaaataacggtcctatttcatacaatgataccagctcaaaatcattttccaatttaatttctgaagaaacttctattgcaaagcaaaacttatcttcaatttttccaaaaaggaactctttttcatatttagctcctaatttcataatttcatcaaaaacaggaatgcttaatacatctccatttctcttaactaataaacttcccttgaatattaaaaaacataagtcttctggtgtactttttttcattatattagataatatattaaaattattttccatcttaaattaattcctttcaaaaaactttaccatttaaagctaatatctaatgtaaagttataataaataatctttattataacatttaatttaaattaaggtaagcatatacatttaatctaagttaacgaaaactaacttatgtatctaataattcaatgaaattttccttattaaacatacaaagaggagcattttgcataacccctcttaataaataaactattattttatataataatccttggccttatattagtattttttacagcagtgatgtttatgatgagatttacgacatttgaagcagcatttattctttttcatatactctataagttcacgctttgctctttcataaccatctctacagccttttttataaccttgatattttcctttttcaaaaccttctttgaaaactttttccatcatctttgggatataatcttcatctttatcaaagtcacactcttctcttctgtctaaatcccaatcttctttttcactaaatccatattcttctttttggtcatattcacaatattcttttttatcatatccatagtcttcttttttgtcatattcataatcgtctttttcttcaaattcgtattcttcttttccaaagaaatcaaactcatcctctaggtcatcaaaatcaaagtcaagctcattttcaaaataataactgtattcttctttattatctttgtaatccatttttttctctcctttgtaatttccataaaattgtttgatttatagaagttctatttatatagcttttaatttatctaatatgctattaaaaatctgatacaatttttttactagaactttgttaaaattaacaatcacttagtattatattatgctgatttataatatttgctattaattactaaagaaatattcgaatatatctcatctttaatctcaataacaaactagaaaagttatttcaaaaatgtatattttttctgcgccttgttaataatattaatgaaaacataataacccgacctaaatttaaaataaaaaatagagatagtattttagaattcactaatgctatctctatttttttatttatactaactataatatgttttgtaattgaatttctacatttattattttaatttagtacttagcttactataattttggatgtggagttatcattacaacatacatatttaatgtataaaatttttatataataatttcaaaagatatgtatatttatttattaccctgtcaataattctaaaggaaagcattattactcaaccacacttaaaaatagagatagtattttttaattaataatactatctctattatattcctctaaattagcttctaattctacctttccaacaattccttaaacaccttattgtgctctatgtctttgcttagagattgaataactcttataatctgctgttcgtttatcttttctttggaattcatagcaattcctattatataagcttttattactttataagtattaataagaactttaatactttccaaaaactcttctcctttattaaaaggaattaagtctttaaaaatctgatttactaagtaattttctagaatgtatgaatactcatctatctcatcataatatctaggattttcttctaggtatgtgcgtaaatcatttttattaaaaatcccatctttatattcattaacacattgcttaagcctaatccctcttatattttcaaacagatcagcctcagcaatatctatataaaaatcattattttctttgaaattcattccttttaacgactcataatctatgtactcattattaaaatcatctaataacttctctattccatcaaaatcatttagtttatatagactctgaatttttccataaaaactcttaagaatatttaaccgttcctctattgaatattctctcaattgaataatatttatagatattactcttatatcccaaaaatattgaaaaagactttccgtcccttcaaaggcttcactatctataattcttcttatctcaatatcattctcattgatttcttcttcgctctctataaactccattttttctttatttaagaacgcttttgtacatatttctatgcaagaaggtaatccactcttttcataaatattatcaacaatattaaatactctaggataacttttgcaagttatacaaagattcttttctccaaaaccaccatgtatatcacaaagcatattacaatttaaaaaaggacatctattaccatcttttagtgccatgaaaccattattaaaaaaatcgtgttcagcttcattcacaaaaaactttccttccaataattctttaaattcaccagtactattagtgtaattattataagtatcctcatctatatttatatcccatcccgcacaacaagtatcaatgcaacttgagtttatgcatttaaagtcttccatatatttgggtaaaaaaacgtttattttcatttactagctccaatcttcttacgtccttaagagtcatttatcatattctaatatagacttatttatatatttcactttatttagagatataatttcaataagtttatataatgttattattactatttcagtttcattatatcatacttaatctcgcaaatatgtacatcatagatgaaatactgtactaaaatatataagacgaaatttaaatcacactctattatgcataaagtgtgataatcaaacatctataatatatattttagaagttatttaatggtaagcttcttttattggtgtttaaatctagcaatctttatctttaggaacgtttgtaggatcttcaactaaagtagtaaaataataatcatgataatgtccatctgcacaagctgttttaccctttactaaatgaatatgctttccgtctggaaggtaaatagccggacctgttgtatcacaaagattatggtagtgatcacaaaaagtatctgtacgtccttctattttatgaacgtgtgaattaccacattctattgcagggccagtcatgccggcaatccgatgattatgtctcacacattcatcgtcttttgcataatctgtacttgataaatattcatgattatgattctttattctatagctaatatctacatagttacagttatcctcatttttatcattttggttatttttataaccacagctgcatctcccgttattattataattgtatctcaccgtaagctcctcctccgttattaaaatatatataatattttatgttttctcgcatatttgtgtgattacttagtaatttagcatatttttattactttcttacgataaatccaccatttcaagtagatttaatttctataaaattttgtataaattagctatcaccattttttaacactggaccattaaaattaaaatttctatacaaaaaatctttttaaacaattgcaaatagatcgtaatattttaattcctaaaatattgtgaaaaataaaaaaaggtcgcattgtacatgacaatgcaacctttataaaatgaagaatcttttatcaaatcacctttatgatatcacaatattttaaattagtaactatttttcataacataaattttgacaaaatatgccacaactctttcaaagaatgtaatataaattaagactaataaaataaagatgcagtcaaatagtgactgcatccaatggttaaacttgagagagagttatttaggatttgaatatattgtgtatttatataatagcatattattttcaaatagtccatattaattaataacttttatcaattaatcttcttaaaattcaaaaaaatagaggtaaattaaatcatacaatttaatttacctctaataataaatattattgagcttgtaaaaattcctcatagctctctattctatcctctctattattcttctttagccagttattataagttaaaatagtctcttctaacttatttatttttatcacttttccattctttttctttttttcagcgtatatattgattttcattaagttacccataataactcccctttcttaaatgtttttattaatttttatcttcaaatatatattaccacattattataaaatattccatactatttaataataattatttgttattttaaaaattatattatattcactttttatctagttcaaaaattaataaataaaatactttagaattatacccgtatataattacataggtctcataaaaattagaataaatttattctatgccttcaatccttaataattgaggattgttattagaaactctaacatgtacctttgctatcttcattctcaaactttttattattacctttactttacatataaaataatagtcctcgacaccattagtaattactgttataggatcaaatttgaatccatttatgccatctaacgcatcatttagcattactttttcttctatagaaatttcacttctgatttccatttttctattttcttttaacatataaacaaacaccttctcctgtaattatatcattaccggtttttgtcagttattaatcaattatataaagcttttcttaatataatattacaaaaagataaagattctgctttattaaaaacaaaagagacagattaaacttaaaatctaatctacctcttagtaattatcgagctcgtaaaaattcttcataattttcaattttatcctctctgtgcgttacttttagccaatagttatattttaaaatattttcttctaaaactcttaatttaattttactcttcttattcttcttaatctccgaatacataattatcttaattatattgcccatgttttccacctccttctatatctataatacaatttgcatgtataaatttgggtactaaaattttaggatatgaagtattttctcatatcctaaaataattaattttttactatatcatatagtatgaatatccaaattaataattaaatttatagctataacatgtagtttatgatttagatttattaaataacaagttaacattagtgacaaatttcaaatcataatttgtttttaatatactacttcttcaatgaatatagtaaggttattaactaaatcaatatattttatattatcattttctttaaatgcaactataggtcttgttggcatatttatattttgcttaataaccatagcttctaacccattactcaactttacagtcaaaccattagggtaacaataaattgatcctacaaaatccttatatatatcgttactgaacctttgctggcccattgctgctaatacttcaattgcatggtgtggtaaaatagaatcatcagactctaatatattaatatattcattacaaatagacacaatctttgcaaattcatatatcttgtccccttttaatttttcaggataaccgctcccatcttcattttcatgatgtaaacgtatgcaagtacataacgttgctgaaaaataattattattttttgccaacttatacccttctatagtatgatcttgaccattagaaactattttacctatatcatgcaatatagctccaattcctagctttaaaattttgtcctcactatattttttcttgtaaccaattattattgataataatgctacattcaatgaatgagtacataattcaagctctttatcatttttagctaaattattatataaataggcattttctgaaatatttatattttcaattatttcttcgactatttttattactggttgttcaggaacatatttttttcttttgcattcatcaaatacattctttaactctttgattgcctttaaccttaatggtgcatcatatatttcttgtaaagtgacatcatttataccatcatctatatagattgtatttatacctattttctttatttgttcaatatttctttcattaatttttgcacctttatttaaatatatcattcctgattgcgtataaataggaaccgctaactctttgtccattgctttttcatttaatataactaatctcataccgttcttctcctcttcataaatatttcatctgtttttatactgttactataaattataataaaatatactttattggtcaattttttcactttatccattctgatcttaataaatcattttattccacacttgcttaatatgttaagttttattaacttatttattgataaaatcttatatagacattttttttatttttattctaattgttgaaaatagtcgtaatacaattatgtttttttgttaatactttaaataagtgaggtgtagtttatgattatattaagcctaatatttttaatctttataggaataaatatattttggagttctgcgaaaaataaaaatatagatgactatatgcaggacatgcaaaaacagttgcaagatgagttgaaaataataaaataataataaaacttaatatcgctgttttaaattgcaaaataaaatgcagccatcatatgactgcattttttatctattaattatgaggggttaaggtaaaggggatttgaatatcttttgtatgtttatatattagcacattatcataaaataatcaatattaattgatattttttatcaattaatatataaattaatacttctcacaacgaaattgcgagcactagtagttgaatctgtaatttagcactttcagcgaaattttcatatccctgtgaaataacaatgtttctcctttcggtagattgtttcataagactaagctatatattgtttatctatatgaatatctttctttatgattatttctaagaaaataaatataagcagcaattggacaattcctaattgctgcttttgataaattatgaaaaaaggtttaacaatttaattattaacatttttttatttttaaaaccattcctatgcaacaattctacttgtcgcaaaacttttatactatctcttctatagctaataatctaggcttatttccatcttgaactttaatatatatccttgccatagtcatttgcaaattttctattattgtttttactttacaaataaaataatactcttctattccattacttactacagctattggattaaagctccatccctttattccacttattgccttttgcaatatcttcttatccctttttgtaactttatttctaatttctaattctttatcatctctaatttctagatcctcaatttctttttccatgatataaacaccctttctaataactataataatacttatttttgtcagtcgtttgtcaaagttattaaccttttgtaaacataatattaccaaaaaatgaattatgtagagttaataaagaatttttttatatctgatcttatatagtattctcaaagaatgtaaatgttcttcttgatataggaaaatataactctcgtgtttcttctgtaattgtcttaaattcatatccttgtgatttatagtattctattatttcgggtaatgcttcacaagtattattattcatatccgtacaatgtaaaagcaatattacttttgataatttctcgcttccctttgttgccttcctatataaactatatggagaaagctttggatttaatccatctgtattatccatattccagtcatatactttaaaattattatcatgtaatttctttaaacatctattatttaaatgcttactgcttccacctggaaaccttattatatttggcgaaattccaataacattatttatctgaatacggcatgcaagcatttcttgtataaatttatcttcactacaataaattttattaaatttatgagtataagtatgaaggcctatactgtttccttcatcataaattctttttacaaccccttctcttccctcaatctggcttcctatgagaaaaaaagttcctttaacatccttttgcttcaaaatgtctagaacacgatctgtaactttatagctaggaccatcatcaaaagtcagataaattaccttcttcatatcatgcgaaacttttttatccagatcatgattttcactagttgtttcattagatgatatcggaatagcacttacgtttttcacgcatataaacataacaaaaagaccacttaataaaaataagaaaatttttattctattcttcaatttctcaccctccttttataatccattttagaattataattctaaacacttcttataatttacatatttaatttttttatttgtggtaattttgaacatctacttcagcgatattttcatagcttttctgaatcaaaatatttatgatttcggtaaggtatacacataagtatagattatagttgagttatctataggaataaaaataaactaataaatatgcacctaaaacattgcatattgtattagtttattatcttatactatttatatctcttaaacttcaataaaatttataattcttttatgtaccacacatcacaagcgtaatgttcagtttcaactaaaggtttttctaatctaagaaatccattcttttcgtaaaatctcttagccgcctccatattatcaaaagtttctaaataacattttttataacgttctctcgcaaattctaaagaaaaatccagcaatttctttgcgatacctgagccccttgcctcttttaaagaatacattttttgtaattcacatacatcttcagttcctaacaatggccctatcccacatcctgctactatcttcccgttttcttcaactacccagtatttagatttttcaccgctatagacttggtaaaaacatcctagattaggatcagaccaagcacagccaggtttattagccccaaattctatcaaacaagttcttattaatgattctacttgttcattatctttttcctgtatttctcttattatcataaagctttcccccactactaacgtactagtttaatttttatataataggatacaataaaattacttatttatcaatattaattaagaatgttccatttaatataacaattaaaataaaaatgttcctgaaactttcatgttatctataatattttccatatcaaaagaaaaactgttcttcgtcacctctatattacttctatctataaaattctaatgcattaagtattttatctgctgctttattatatttttttattctttcatggtctttttgagaaggattttcgattcttgataaattcatattgtcttttaaatcagctagctttatctcgcatgctaacctattagtaattattctttctataaactcatcgtatgtttcattatgccgtcttgttaaagcatccagtgcagatagtatttcttcagaaaagccttcattttttaaataatctattgtaatatcagtatcttctattacatcatgaagcactgcacatatcatttcttcttggcttctctttgaaagcattaatcttagaggatgaagaatatatggtttaccacctttatccacctgaccttcatgagcttttgctgctatacgtatagctttttccaacatatcttcatctccttttactagtcaaattatattttattctgcatttaccgcaaaaaactgctataaaattaatatccaaagcagttttttatactgtaataatctatgcaaaattgtattcgcctttaaattagaatatcatttcataatatctctttacacttgcttccaattctagtaaatctaaatttcttcctactcttatgctttcctttccttctatataaagcagaaatattggtacagaaaatacattatattttgctgctaaatctaaatgcttttctgcatttacttctccgctcttaatttcaggaaatctttttaaaatatcttcaatcttagttttaatgacttcacacgccccgcaagctcctcctgtaaaatatatcgcgctcattcttttgtcttctattaaatctaatagttccttatcattattcaaattgtccaacttaatttacctcactatattgctcttctatcatcacatttaatgtcataactttatcctcacctaatatttgatttgcagcattatataaatatttatcttctgtcactaatacaagactatcatctgaatgacacgcatataaaagtaacaaatcattctgtgataatttatttatactatttaaatatatattaccacttttagaatactttatatttaattttgatgaaaattcttcgagattgctcttatttatttctataattgaaaatagcaatttacagaatctttctgatagtacttgttgacctttgtattctttcctttccttgacaacaagctcctcactcacttcttttaaaattattattttctcatcttctatgagtttattaataatcgaaggatactgtttccagagtcctattacaatattagtatccaataaatacttgttcataattatccctcccgcaattgctatattattatccttaatctatttatatatttattatactccgtattatttttttattaattattataatcttagttttctcatctatcgtaaattcattcttttaattatataagtttttctctcatacatataaagagctttagacataatttttattgttttatttttattgtattctcctcacctacttacatgtgactcttgcaaaatagtaattttcaagtggcaaacctattaatgatatagctcaaaataacaaataaagtcgtgcatattgactacatgcacgactttatttattaaatttcaatcagtatattttataaacttaagtcttctccattagttgaaataacttttttataatataattgacgtaattatcaaataactacatcttaaaatcaactattatttgtttctttgaattttatatgattaatttattaaaaactattaatataaaattaactcatataatttttcacgttatcctttgttactttttcaaatggaacccatatatgtttaccatcctgtgctaaattttctatattagataactcaccatttgatcctagttgaatagctgcctgcaccgcatttttactttggtctttcgcagactgataaacagtaaattgtaaacctccatctaaaatagccttgcatccatctgacgtagcatcaattcccacaattggaattaatgaagtatcgattttattttctttaaatgaatccattactccaagtgccatttcatcattattagcaattacacagtcaaattttctacctgtagacaggaatatattaaacatctccttagctttttccctgctccaatctgcattatcctcaaaaacataatccacatctattcctttttccttgaaagtttcttttactgccttcgtacgccctttagtagctgcatgattcttctcaccttttaataaaaccactttaatattatttttatttttcaaataatctgcaatatattcagcttgatacttccctgcaatcttttcatctgaagccacataaatgtacttatctttttctagtaactcttcacttggactactattcataaatactattggaagatttcctgccgcttttttaagttgtagccctgtagttgaatccactggagtgcacattatagcatcatatccaccagaaactgcctctttcatatgagacacttgcgtttctatagaacctgccgcatctttaataactaaatccactttttcgctatcagcaaaatcttttgcacttgttgctagtatactacgaaatgtatctgaagcatctgaaattgataataaaatttttacgtttttctttgatgaagaactgctctttgagctacatcctgataccataacaaacatcaaaattatagttaataatatagatatcttctttctcatactatatacttcccccttaaaactcatcatgtaataatcataaagtctaatagaacaaaattgcaggcaactgtgaaaccttctaaatctgtcttattgataatttatttctcacaagtatcacaatacccatagattttactctaatgtaaattcctagagaataaaaaatatccctatattttaaacatttgaatctgtttgctaagttcatcagatgtatttgctaaagtttctgcatcattagctactttttcactatttttagtaatattatttgattgatcaaccatgacttctgacgttgctaaaatttcctctgaacttgctgcttgttcctctgctatagcggctacagttgttgcaacatcatctaaatgtccaactttttcaatcatttcttgaattagatcatttgctgaattaattttattgaaaatattatcaaatgtatcaactgttccacttattaaataactactttcattaatatattctgcactatcatgtgattgctttacagtatctgaaacaagtttgttaatttcatttacaatagatgaaatgtttttaacagattgagaacttgtattagctaatttgcctatttcacttgctacaacagcgaagccttttcctgcttctccagccctagctgcctctattgatgcattaagcgataaaagattagtttgttctgcaatgcttccaataacatttataatactagttatttcaattgaagatttcccaacgttgcttatagcctgctcaagggatcctattgaagtccttatattttccatagctacgcttactttttccatatcttttatgcctttttctgagattttaatggtttccttcattttatcattcacattattgccatcatctctagtattagaaacgacattagctaaagttgttgtattctcagctatttctcctacagaacttgataactgatctactgtgaggtttaaattctgcatagactcagattgaagtttagatgaatcatataactctgtagagattcttataccgccttcagattgttcactcattttatttgatactatgctaatattatttatcatatttctcattactgttataaactcttttacacttttcagcataactgaaatttcatcattaccccttatttccacatcaactgtaaaatctccattagtcatagatacaattgtgtctgtaagttttctaataggttttataactacttgtacaactcgctccactaaaacagctaaaataataatagagataatgcctattaaaatcataaaagtacgaagctttataagttctgataaaatagattttgtaggtacatatgatacaagaatccaattggttccctctacttctttaaaaacaaccctgttattatctaactcgcatgaattgtaatctttattttcaatttttcctgaaacatctgtaaaaaatttatcattgatcgaatcaagtttagtggaaattaatgcactatctctattagccactattgttttatcattaatgtctattaagaaagcttctgcatcatgcatctcaatcattgaatttacaattatcgataccttgtccaacgaaagatctacagaaaaaatctttatctttccagatttatcatttaatattgccgaagcactaacaacattcttaccagcttcattcttatatggtgatccaaatgccatattaacgcgagtaagtccctctttataccacactgaatcaagtacatctttatctgatttattagatttttctgctttaagtagctttccactctcgtcaccaatgtaaaatccttccttacaattgtcactgtatccataatatttatttagtaagtcttgtaattgtttttcgcctaaattcgcaacctctaacgaatcttttaaagttttaaatgatgacaagttttcgtttaacaatgattcaatttgatcaacctgcttcttacttgaggtttctagcaaatcattagctgaattggttattatatttttagacttattgtaagaaataaagataagcaatgaaattactattactagcattggaataataattccaagcaattttgttttaattgaaaccttatacttagtttccccttttttcataagcatcccccttttaggcagtatagattataatagcattattactctatctataatacaatttttcttcctttatgtatacattcttctacaatatttcatatttctcctttatttttttatagctctatatttaaaacgaacttttatttaaaaaattgcagatgaagatatcttcatctacaattcttatttaaataatttttatatatttataatttctcacataatgttttaattgcatacattaataagaaagctaatccgattccaaatgaaactcctgtaattagccttctaatattagttgatttcttaattttaaataattgtagtaaaccatcacaaatcataattaaaatcaatactccacacatctttaaactaatctttgctttggctacaaacaaaatcactgcaattatataacccaaataaattccagtacaccttgcacacactggaaattgaaatccccaaaaactgaaactcctttcatacatttgatggcagccactaagtgcaccagctttcataagaagtatccagaactttgttttcttatccgttacattatttaaatcttgccccacaatctgcacacaccctatacgtatttgtcttagttttagtttttcccataccgagcattccgcatagcaatccaataggacctaaacatatatatcctaagcagccttttcccgcgccaaagcctttcgtagtttcagtaatatcacttactactctgacatttaaactcccacatctaggacatccaacatttacattattcattctctgtatcccccataacaataaaactaccataattatactactgagaaatattacattgcaataattctccaaattctaatttattttacatattcacgataaggcatacgtaaaattctattatcatcaaatttgtattttgtaccttctagaggatcttttcccttaactaagttcatgcctacagaatatattgcttgagcttctgcatttgcatcttgaataactgtcccggtcataaatcctttatcaactaattccatagcttctggaattgcatcaattccaactaccaaaacatttttatttttatcacctttattatatccatatttctgaagcgctttaacagctcctatggccatagcatcattatttgagataattgcttcaacattattaccatatcttaaaaacaatgaatcaatgctagccctagcacactcctcatcccaattacagttttgtatcgcaagttcctgggtttttattccagcatcattgattgttgaaatagagtactttgtcctatcaatagtaccaggatgatctatttttccctgaagcataatatattgaagtatatcatctttatttttatctatcccccccttatttgcattccatgaatcaacaattatcttaccttctagaactccagattgttcagtatcagttccaagaaaaacaatactcttgtaaggggtaataaaatttaatatatctttattaggtgttccatctaaaattaatggtatattatttttttcaattttattaattacatcacttatagtatccacctttgtatcaaccagatttattacaaacaagttaaactgatcatcaatagcttcgtaaatactttcgttttgtataacctgatttccttttccatcaaaaaaagtaaactcaaccttgccattattttctttctgaatctcctctaagctctttctaacctcaatgttatattgatcatcttctctagattgaaacacagctacttttactggaattatcgaagccccatttaaattaattgctaaacttttcgaaatactacctattagcataattattattacaaatgaaattgtagtaaatataagtatctttttaaatacactcatttcaagaccctcctatacttagttatactcatagattgtcttttaataagagttttattctgcatataagagcattttatgcaaatgaatattatttattttttattcttcaaagatactaaaccaagctaattaatatgttcaaaaaattattcatatattttactgaattataagtttctaaggagtcatgaccacccgtgaaaacgggtggcttgctctgcgcctgtaaggctttgttactggccgtgctactcgcacgttgaaatggtctgccgaccgcaaaaccttttccggctgcacctaaaaggtgctttatttcttgcctttatttaccggctcacccgtaaacgggtcgatatattccttcaaactcatttgttcataagctatatcttcctgtatttgattttttatatactcttctattactttcttatttcttcctactgtatcaacataatatcctttacaccaaaattgcctattgccatacttatatttcatgtttgcatgtttatcaaaaatcatcaaagaactcttgcccttcagatatcccataaattgcgctacgcttaatttaggcggtatacttacaagcatatgtatgtgatctggacatgcattagcttctataatctctactccctttctttcacataataatctaagtattcttcctatatcagcttttatctgcccatatataacttgtctcctaaatttgggtgcaaaaactatgtgatatttacaattccacttactatgtgctaaactatcaatgtccattaacggacacacctccttgtactttatagttgtggtcggcaaacctactataattttacaacggaggtttatttttttctacttatagctaaaagctttccggaaccacaagtcaaacttgtggtattcttaaatacaataaaaaatttaatgaccacaattttgtggtcattaaatttcagctttatgataattcaaaagctcctgtatataattgataatacttacctttttcttttattagatcatcatgatttcctctttcaataattctaccttggtctaataccataattacatcagaatttttaattgttgaaagtctatgagcaattacaaaaactgttcttcctttcataagcttatccattccttcttgaacaattctttctgttcttgtatcgatgcttgaagttgcttcatccaagattaaaactggtggatcagctattgctgctctagcaattgttagtagctgcctttgaccttgtgaaagactgcctccatctcctgtaagaactgtatcataaccatttggaagatgtcttataaatgtatctgcatttgcaagttttgctgctgcaactacttcttcatctgtagcatctaatttaccatatctaatattatctgctactgttccagtgaaaagatgagcatcttgaagcactattccaagagatcttcttaagtcatcctttttaatcttattgatattaatgccatcatatcttatctttccatcttgaatatcatagaaacggttgattaaattagtaatagtggttttacctgctcctgtggcacctacaaaggctattttttgtccttgtttagcatagagctttatattatgcaagattatcttctcatcattatatccaaagtcaacatcatcaaatacaacttcaccgagaagctttgtatacgtaatagttccatcttcatgaggatgtttccaagcccaaattccagtacgctctttgcactcctctaattccccattttcattttccttagcatttaccaaggtaacatatccttcatctgtttctttcttttcatcaagaagcttgaatatacgttctgctcctgcaagtgccataataacaaaattgaattgttgagccatttgattaattgtttgactgaagtttcttgttaattgcaaaaatgctgcaagtccaccaagcgtaaatccaccaaatgcactaatagctaaaactgatccaaagatagcaactgctacataatttatatatccaatgttacccataataggcattaagacattagcatatttatttgcattatttgcactattaaagagcatatcatttaatctatcaaagttagcttttgcttcttcttcatggcaaaagacttttacaaccttttgcccttccatcatttcttctatatatccatttactgcacctatatctttttgttgaagaccaaaatattttccactctttgcaccaataactttagtaactttaaacatcaatagtatgattataatttcaacgcctgttaaaggaatacttaaatatatcattgaagcaaatatactaacaacagttatgatagctgataataattgtggtattccttggcttatcatttgtcttaaagcatctgtatcatttgtatataaactcatcaaatctccatgagcatgtgtatcgaagaactttattggcaaactctccatatgagcaaacatatcatctcttattctttttagagatccttgtgagattacaatcattatacgactatatatataagttgatataaccccgacataataaattactgccatagtaattatcattttaagaagcggtccaaaatctgctcctgatttatttaaaagtggtgttatataatcatcaattaagtttcttaaaaataacgttccaataacattagcaagagaacttataataatagttactagtaccatgaaaaataaaaacttatattctttaagtatatacgctaataatctttttagtatcttcaaagaatttttatcggcttttacaggagcacgtccgccacgtcccatcattctaggaggtctattgctagcattatctttactcattgtcgctcgcccctttcatttgagattcgtaaacttcactatatatttcatttgattttagtaattcttcatgagttccaaatccatctatttttccatcatttaatacaataattttatctgcatcttgaactgaagaaatacgctgagcaataataatctttgtagtatttggtattgtttctttaaatgctttcctaattaaagcatcagttttagtatctactgcacttgttgaatcatctaaaattaatattttaggctttttaagtagcgctcttgcaatacataatctttgcttttgccctccagatacatttgttccgccttgttcgacaaaagtatcgtacttatctggaagattttctataaattcatctgcctgcgcttgtttacacgcttcaattaattcttcatcagaggcatctttatttccccatcttaaattctcttttattgttccagaaaataaaacattcttttgtaataccatagaaacctcatctctaagtgtttctatatcatattttcgaacatcaactcctccgacctcaacactaccatttgtagtatcatacaatcttggaataagctgaacaagagtagtttttgaacttcctgttcctcctataattccaatagtctcaccagaattaattttcaaattgatattttctaaaacaaggttgtccttatctttgttatacgaaaagccaacattattaaaagttatagatccgtcttttacttcataaactggattttcattatttgccaaatcacttttttcatttaaaacttctgtaattctttcagctgatgatttagacataattaccattacaaataccattgaaaggaacattaaactcattaatatattaagagtataagtaaataaactcatcaattctccagttgacatagtatttgaaacaatcatttttgcaccaagccaagataaaagcaagatacatgtataaactgtaaattgcattgctggagcattaactatgattaatttttcagcccttataaaatatttgtataaagtttcagaagctttataaaacttgctggtttcatgatcttctcttacataagcctttactgctctaattccagttaaattttcttgtacactagcattcaaatcatcatactttttaaaaacttcaacaaaatatgggtgtactgtagtcataatgaaatataatataactccaagaaaaactattgcgcctataaatatcatagataattttgcattaatataaaaacacattgttgtagcggatataagcataaatggcgcccttacagccattcttattatcatttggaatgcattttgaacatttgttacatctgtagtcagccttgttataagtccggcagtagaatatttatctatattggagaaagaaaaattttgtatattatagtacattccctttctcaaatttctagcaaaccctgttgaagctttagatgcatgtacaccacccaaaactccaaaagttagagatagaaatgatgttattatcattgctccaccaacaatacttacatatttcacatcaccttttcctactccattatcaataatccatgccattaaaagtggaataattgtttccataactacttctaatgctacatatagaggagttagaatactatctcttttaaattctgctacaaaacctgctaatttttttatcataattttcctccttctttgttaggtttctaactaatagcttaaaaaaaattgcactaatctgcaattttcttagctaatctatcaattaaagaaactaatatattgaattcatcctcatttaactcatctcttaaagatttttcaactctaaggataaacttatatacatttctttgaatttccaagcccttttctgttaatactattttttttagacgtgcatcttctgatacacttattctcttaatatgcccgttcttctccattaattgaagtacgcttgtcactgaggaacgtctaatatcaagttcctcttctatatctttctgaaaaatatcttttttatctgatttatgagatatgaaaccaagaatcctagcttgaactccagtcacaccatattgtgaagcttccttatctattcttctatgcaatctcctagataacatactcaattttttcccaatgtgtacctctttatccatacttatgctcccatcaatttgttagatttctaacatatattattttagtttcactttttaaatttgtcaagataatataattttattttaataatatgtttcaactgttataaattaatttttttatttctcataattctctacataatcttttctatttcctttagactgttctattttaatacttttcttgtttaaatatatcacttctatattacttcacaataaaacacatgtatatcaacttcaaagttaacatacatgcatcttcatcccaatataaataatcgtatcatcgtttctttcttctacccatatacttcctgaacctgtttcgattacttttctcacaagtctatattctattaatttgcctatattcttaaataaatcgatgggcttaaacatcagcattaatagtacattatcttctaccagtttaaaatctattttaaacttagtattatgtttgcaatgttgtatcaagcaaagaaataaattgttaagtacaagtttcaatttatcctcatcaccgtatacatagattgggtgtaaaatctcatgcctattcatctctacttttatgtttaattcttcaaaaaattcatgttcaatattaactatgtattctaatagatcttttatacctactttatttctcatcacattgagcttaattccttctattttttcctcatttgtagctttatagatttcattaataatatcatcgaataagtttttcattgaatttatgatttctgctttactatatttctcaacatcattcaaacactcaatatattttgacaaataattaattctagttccaacgtcaaataaaagaatcttctctaattcatcagctcttttttcaaatactcttgcttcttctgaagatttttgtttcgataatcttcttatttcatttagctgctcactatttatagccattatttcttcataataatttaatatctcaggcttacttgcaattcctatacaaatatgattattatcaatatattccccagagatacttacaggttctagctgctttcttatctttaaatttatctcccaattagatacttcgtgcatatcaataacttcatacaaaaatcttattatcttgcttttactagcatcatctactgaattaataatagattgtccacatataggaaatacaactaaaccaagttcattctttataacatctactattactccttttaaattgcaaattattattacatcataaactttttcattaaatagcataatatcccctcaatcaattaactaattacatcttcttttgaactttcttcaataaggttttctgccaataaacaagcttcttccgcgtttgatgaatatccatcagcgcctacaattctccataaatttttagatatattaaatggatatcctccaactattattttgacatctttacatctaggattgtttcttataagttttattactgatttaatcgcatcaacatgataagtcattgtggcagagagtccaagtatttttgcatttttttcagtgatagtccttacaataccaagcaaaggtgtatttgctccaagatagtatgtatcccatccttcaagttcaagaaaatcacataccatcctgattcccatttcatgaagttcacctgaaacacatgctcctacaaaaacatgatcctttttaatgtcattaaataatccagtatatattttagacatcaaaagttgtgtaacggcactacaataatgttcctgtgctacagaaattttattcatttgccacagccttcctatttcatacatggtcttttgaaatatattaaggtaaatacttcttatatctactcctgattcaataaggttaaatattaaccttgctgcgccactcctatccgactttagaagtaaatcaaggtacttatccgcaacttctgaatacggttcgttcttgtttatgaatttatctactatcaaattcattttcggaattaattctatagcttcttccagatattttattataaggggacttatcttcattccatacttttccttaaagacatctataatacatcttagattatcagatacttcaatagagttaatattatagctatttaaaagaacttttacccatcttatataacttaaaaataattccttatcttccgtttctactgctgcttttagaaagctaaaatggtactttacatcttgtatacaatgcaaatgtcctagctttccgcatttctctcttagttcaggatgccttaaatattgaagttctactatttcttctgcaattacttcctgaaattctattatctcatccatagttactagattaattttttccatttcttctcatcctttagttatcttttatatttatctataagtatgtacacctattctctctttaaatttttattttcttcaagtaatttatttattaatatatccttacgcttcatctctgttatatctcttatatttattaatattccttttatctttgagtttcctgcaaaatatggtgagatagatattgagtaccatttatcatcaagtcctgtaatttctttttctttggactccaacgtttttagaacatcatgaatatcatatagaagttcatcatatttcaagttccaagatatatgacttattggccttcctatatcggaactaataatattcacctgacttcttactgcaggagtaaaccttcttatacacaaatccttatccaaaaatatagtatttacattagttatcgatagaagattatttatatcatcatgggcctctgttagttcctgtatttttaattgatattcagaatttactgtatatagttcctcattcacagattgaagctcctcatttgtactttgaagctcctcatttgaagctaataattcttcatttgttgcttgaagttcttcatttgaagattcaagttcttcaataacagcttgaagattttcattgctatatttgagttcttgctcaagatctgttattctttgatatgtttttgaatgtatttcaaattcttcttcattgtctatacttgcttcagaaatcttttgctcttcaaataatatagctgcaaatttcttatgtgtagtctcatcactgaaaggcttaactgtaagtgtaagatctacatagccgttaggattctttaattgtatgtttttgtatttaagctctttgccttctcttaagacattatgtactgcggtacttaccgctatagataaatctgaccttatcattttcaaaatatttaaactcaatttattagaaggaattctaatataattattcacatctccaattacatgtaaaagttcataactttcatcaattatcaatccccttggaatatactcttcttgaagctgcttcataaatctttcaattgatttttccaagtagtttgaaattcttgaataattataccccaacaaacccgaatttctctcatgaacatattttccaattttatttatattaaaatttgcaactcttggaagcttagtatcaccactacaactgtaaattttccatttactatttacagcactaaaaaacttttctgactctcctatagcttcactgcttcctaagaataaatatccatttttatttaaagcaaaatgaaagtatgatagaatattttgttgtatttgatgttgaagataaataagaaggtttcgacaagttataagatctaattttgaaaatggaggatcttttataagattatgtttggcaaatataaccatatctcttatattcttattaacttgatatttatctccaatctttatgaagaaattcctaagtctttcagaagatacattgtcttcaatatcagatggataaacacctgtacttgcaacactgagtgcatcttcatctatatctgttgcgaatatctttacattgtatgatttgtctgctttattcaaatactcctttataagtatagcaatagtatatgcttcaggcccaacagaacaccccgcaacccaaattcttatagtacttcctggactttttttctcaaaaatcttaggaattacctccttctcaattattccaaaagcttctgaatccctaaaaaactgtgtcactccaataaaaaattctttataaagagtagtaatctcatgagggttcgaatttatataatttagataatcagcaatattatgaaaaccatatatccccattcttctttctaaacgccttaatactgtacctcttttatagtgaaaaaaatctacattagtgtattccttaatgctattcaatatttttatataaacttcttcattgtaatttgatatatccactttttctgaaccatcttcctcggattttacgtatttcattatctcttctggcatttgagccggttctagtatgtaatcaaaagcaccagttgctataactgattggggcatacttacaaactgggcacttttattatcttgtactaaaacaagtccaccatttgcttttattgatttcaccccttctgatccatctgaaccagaacctgaaagaattatcccaactgccttttctttctttgccctgctaagtgcttcaaagaatatatctattggaagagaaaaccctttactaacgtctctttctaagaggtaaagtttattcccctttatagtcatgttctttccaggcggaataagataaacactatcggccattatttccatttcatgttccgccataaacacattcatggatgtatgtcttgacaaaagttctctcataagactcttgtgatctggcgataaatgctgaataacaacaaaagctaatccagtattttcataaatattatcaaaaaaattatttattgcatcaagaccacctgccgaagctcctatacatactacatagggctcaacatctatttccctttcttttaaatttccatactcattatctttgcactcctcactattgctgataatattattattcattgacaaaccccccgtaaatattttagattaggcatatatatctgaaaattcaacatcaatcttttccacattttcctgccataggcttgctttatcaaccaggttagagttatcttcaatagttcttactggtaatgtaaatatgaactcacttccttttcccacgtcacttttaacttctatccttcctccatgaagctcaacgagagattttactaaagatagtcctatgccacttccctcccgatttctgctcaaagtcttgtccacttgcctaaatcgttcaaaaattatatttagcttatctttaggtatacctacaccagtatctctaacacttacttgaatttcatcacttctatcatagatatttaccataatttgtcctccctcaggagtgaattttactgaatttgcaagaatattaagtataattctttcaattttatctggatcacaagcgataaccttttcttcaacttctgtatcaaatattaactcaatattcctgttttctacatattgagcaacagataatgttatattttctattatctcaattatatcatagtttttaattaacatgttaaagaaccctgagtctattttagttatatcaattaaattattaactaatcttaatagcctatagcaattttgttttatcattccagtatatttttcagtactaaaactattaattttattatcctttagtcccataacctgtaatgcactaaatattatatttataggtgttcgtaactcatgagatatgtttgcaaaaaattctgtttttaccttatcgtattcctttgcatctttaagttctttactcttcgcctccattgctttcttaagattatgtgcttttaccttttcacttacatcttttattataaataaagacatgttttcatcctcagaaacaaggtttgtatactctatttcaactggtacactttcacctactgaattaataaacaattctgaagttccgtagcttgaaccatatatcggaaactcttgtgggtccataaacttatccatgaagtctaatttataatcagtatgaacataatttatcaaagatcttcctatcgcatcttctgctccatttaatccaagaagctttactccctcattattacaatattcaattccatcattactacataaaaatactgccactggaaggagagatagtaatcttctatatttctcttcacttttaactaatttctcctcaagttcttttctttttgttatatctgtataagatactattgctccaccttcattttctaaagaacttacactagttaaataccaatttctctttgaattttgctcataataactttcgaaagtatagctatctctttttccagtgaatacttctctgaccttagtaattctcttaacattttttgaaatatcctttccagataagctggtatgaacttgctgaaaactacttccctttttaatctgattatttattttattatcaatacaaaattcttccatagccttattaactgcaattacatccccattataatcaaaggcagcaattttagtatcaatggaatttaaaagaagttcattaagttcaaaagattggctcaagctattttcagtctgctttcgccaatcaatatctatacagtacataataaattctttacctttctcgtcatctatctctactgttgagtaattgcaatgaaaccatacccatcttccttgattatcctttatacgtttgtccattgttgaacttttaagttcacctcttaaaagtttttctatattctgtctctctattattaattcctctttattgcttattctttctatgcttatatcattaagttcacctttagaataaccgagcctttcttctaattctggtgacataaacttaattttaccatccatatctatctttatgatagttataaagccacttctaattattggagataaaactttatatattctttctttatcttcaaatgattttttaatcttttccactatgttctttttctctaaacttttaaatacgtacactaatacaactactgcaaagattatgaactctgcaaataagtgtaatttttccatttgtagtccccctaattttctaaatttctccaaaaccattataaactcctaactaagtcgtgtaaattattacttatcacttttttactgtgttattcgacagtttgaataatatttattgcgaagtaacacgaagaaaaagatacaatgtcctttttagtcactgtttatactctggtaatacaaataattctttaattctcattctaaaaaggttattattctcctatatttttcaatatgtatataaaaataagaaacttatatttaaaatcctagtaattcaaacacttatgtaaaatgaataagctcaatcgcgacatatatattgtaattcacaatacacaatacacatttcacaattacgattaaaattgttgcaatattttcagaattatcatgaagaattattttttcaacatatatatttaatttactatcgctgtaacatacctaaaccgtaatcataaaatgaatgagacaggctttactgccatagcaaaaatacaaggagattctcaatgtataatgatgattttttttactgtccgtattgtatgcagaaaaatatttgtccattttttgatgaacaaatgaaaaatttcggcgatgatgatcaaatgtcaagatttgatagatacgaagattcttatgaatttcaagattcaaacttattgactaaagaaattcactcagattcttatagagcttctgaccaagaaattaatagaatattacgattaatgcgtaatcaaatgcctcaacttttctcactactccaaggagttggcgataactattttagaaccgctattgcttttactttagataatgctcaaacatatccaggaaatataaatcaaagtgtaaatagaatttttaatgactttagaagaagaaataattcaatttttctttctcttcgttctctaggtgttcctaacaacgttattaatctcacctttagatctataattgaatttactcttagaaacattaaaccttcaccagctcctggtccaaatcctactccatcgcctagtagtggttggagtaaatgggaagatcttggcggagttttaaaatattctcctggagtttcttcttggtctgcaaacaggcttgatgtatttgtaactggatctgataatgctctttaccacaaatggtgggacggctctcgctggaatgatttcgaaaaccttggtggcgttctaacttctggtccagcagctgtttcttggggaaataataggatcgatgtatttggtaaaggttcaaataacgcaatgtatcataagtggtgggatggctctcgttggagtgattttgaaaatcttggtggagtcttaacatctgcacctgctgcttcttcctgggctgccaacagaatagatacatttgtccgtggaacagataatgctctttatcacaaatggtgggacggctctcgctggagcgactttgaaaaccttggtggcgttctaacttctggcccagcagctgtttcttggggaaataatagaattgatgtatttgttcgtggtcagggaaatcgtctatatcataaatggtgggatggttctcgttggaatgactttgaagaccttggtggaaatttagcatctgctcctgctgtatcatctcgagcttctaataggctagaggtatttgcacgaaatcaaagtaaccaattaattacaaagacatggaacggttcgcgctggagcgattggcaaacaatcggtggttccttcactttagatcctgcagctgtttcttggggctctaatagaactgacgtatttgcaaaaggtccacgaaattctctattgcatatttggagagattaattagtataaattactgaattataattttctaaaataataaaaaatgcttagttttttctgtactaagcattttttattgctataaactttacaagttaagcaatgtatatagattttttataaactcataaattcacaactaactttctgcatctgtgtattgttcttccgcttaacgaaaatctatggaaataagttgtattaataataaataaaaacaaccaattatatttttattaaaataaacaatacattcaattaaccggttttattaaatagcaacttccaagaatacatttaacttctttttttattgcagctacagctacccctacttcttctgaatttgaataatcattaagttcaccataaattcctgcaattgaaagcgaagtaagtggaaatataccattttttccatatctatctgtggccgtaacatatctattacttctgtctttttcattaaaaaaatttaaaatcccatcattaaacttctttataattttttcacacacttcttcacattcttcaattggattttctaaaatacttacaaaatcatctcctcctatatgtccaataaatccattataagggaaaagtgattttatttcagcttgtattaattgagctgtatatttaagaatcctatccccattttcaaatccgtatgtgtcattataaactttaaaattatctagatctagataaagaatacaacatttacgttttgttttaattatattaattatattattttgtatagcggtattacctggtagctcagtaaggggattaagttgtctcgcgtagttacattctaacattgtagtataatttaacaaagatcttattgtaaccattccacagtatttattattgttagttacgataatataatcatatatattttgtgttttcctagacattgctagccttgaaacttctgttactggtgtattgtaatctacaactaaaggatttgtatccataactaaagaaacaggacgttttgtaaaaattgcaacaccatattttgtagcaagcgctgagtctaacgtatgtttcataataagacctaatggtacatcattatttactatacaggctccagtaatatcgttagaatcaaaatattctttaatatcaccacaataagttttaggcccaaatggactatcatgtctaacaatttcgcctatactgcttgactgatagttataatacacattatccttaaatttattacaccttacaattaaatctctaatatgattaggtatatctagaaaagttcctgctggacgacttagtaagaaaccttgtcccgcatagacgcctaagtttactaatgttctcaattcttcttctgtttctattccttcagcaataagcttcatattcgttgcttccgatagcttaacaaaacactctactaatgattgtttaaatgaatcttcatttatatctctaattaaatccatatcaatttttacataatgtggctttgtttcattaagcatcttaagtcctgaatatcctgatccagtatcatcaattgcaattttatatccttgatctacataattgctaagagcctgtttaaaccctttgtaatcttctatacacgtcttttctgtaatctcaaatattatacaatcaggtgacatgttgtgttctgcaagaaattccttagtaaagcccttcttaaatttttcatctttaaaaatatgaggatctacatttataaaaagatatttatttttttcaatatttgtagctcttttaatagcttttattctacataattgttctaactcccatgttttattataaacctgagcagcgttaaataacttatctggattttgcaatggtgagtctatcggccctctgcttaacgcctcataccctatgatttccccatctaaaagtgaaacaatgggttgataaactgtagttatatttttactatttaatatattttccaactcctctgcctcattatattttaaattatcaactaatgaatttaacatattataatctccccatatttcttcttattagctattatagtagctcttgtaaatatagttgaaatataacataatcttattaaaagtatttataatttttgttaagttagtgtaaaaacgtttatctagtcaaagccaaatttattacataaattggaatcaacatattttgcttccataaacttatgatataattattgtaaagacaattctaaggaggcatcttcatgacaaaggttaataaattatctacaacaaaactgtggaatcctaaatcatttattatattttccgtatttttctcatttctaccagctgggatcatgtgtgctttgaattatggacgatctggaagtcaaaaaaagaagtggatatttcttttagcaagcatcttagtatttatagcacttattgcactgctgcctatattatcaattaatacttctatcatatttttcagtattaatatagctttaggaataattcttatgttcacccagttaaagctgtataataaacatattcaaaatggcgggcaaagtgcttcatatttacttcctgtaatcatagggcttttgattttttcgttgtctgctgcttcaattctatactcaatttacgtaccaaaaaatgctcttgattatggcgaaaatcatttattttatactaataagataacagaatcccaagcgaaaaaacttggagattacttaaattcagaaggatacttcactcctagttcaaaagtggatgttaaaattgataagcaagatacactctatattttatctcttgttgtagaaggtgactataaaagtgatacaagctatgtgcaacctatgaaagcaatatcaagggaactttctaaaaatgtttttgaaaataataaagttagaatagatttatgcaatgatagattccaagttcttaattccatcaatgtagattaaaactttcttatattactctgcaatatagatatcccaactaagacctgaacttatgcatataactcgccgaaatgagtaacatacttttgttccagtttctaggtaattatgatgggtgattctaaggctataaagttgcacccaaagtgctagcctcaaagaacaagcgctcacagagaaagttcgaagaacgaaatataaaatttcgattctcactttttgaactagcactttggaacaacttataaccaaagaatcacatccatcaaaattaccaatgaaacattccacaaaagtatattactcatttctggttggaatatatttcatagtttaagtatagtttatgattataatatctatataataaaaataatctatctttaaattttattctaaatttcagcaaaaagaagactagcgtttaattgctagtcttctttcatatttatatgattaaatgagattattgtatgatatttcatttcttcttgaatatacaaaataaatctcctctttctcctaagaatttatacatttcaaaacataggctggcggtaaattaaagataactctttctatatttatttttttaaaatatccagtaataaattctttttttaagagagtatattgaaatgttatgaataatccatttctttttaatatatttctagtttgtcttagaattttatttgaaacatatttaggaaggctagcaaaaggcaaccctgatacaacataatctactctgctaagattatattttgctaaatgtttgtctacattttcagcagaatcatttattattataatgtcatcttcacctttatatttttcttctaattgtctgcaaaactcttcattatattcaaataacattaataatgtctctttcttttttctttttacaagcttgtccgtaaaaactcctgttcctggtccgtactcaattataacctcagaatttttaaaatctatgtttcccaccattttctctgcaagtttctctgaactaggtgctacagcccctatagttctaggtgatttaaaatattcaattaaaaattttactagcttcatattaaaagcctccttgaattcttctcttttagttaaattatagaattagtataaatcttaaatattaaaaatctatttagtaaaatcttaagaatctttaaattttgttttaaatataaagaaagaaggtatacactttaaccctcttttagactttattttatatataatgtgcttttagattgatttttgttctttttaattaaaattatttcttactgtattaataattttctccttattttcctctagttgaactaatctatttacattagctccagatggatgtggaaagccttttaatatttgcttttcatttataattttattttcacatagcttgtataatacttcttctactgacctgcctaatggtactataagaattttatctaaattatttaataatcttaattcataaataaaattctcataaatatatttcatcaaaaattcactcttaataagttttggaatatgacctgaatagttttttccttgtacaaagactggataaggtattagtgaaaatgtatgtaataaataatctttttcttcaaacaattggctgcaattttctatttttaggctcttattaagttctattttatctaacataccaattaaattttttctgagactaccgctaaatcttcctgctttcttacatttatactgaatttctttaatattatcagagttctccaactctcttcttgcagtagcaatggcagtactcatttgctggaagcctggagttataccaacaataaatacccttgcgtctaaatttatatattcattgtgaggcgaataatatatttcaagttcttctttcttatcaattaaaaaatcgtttatcaatagttcactcttattgtatttctcttttactggtaattttttaattttatctttataatcatataatgtttttttcataatcagcctctaacttctacatttattttgctactttatattatcttcataattaaaaaatattattaatatatccttcactaataattataaatttaatggaattttttttaataagagataagaacaatgtttacatcatgctccattcgagtttcttatcgcttttttatatttctccatttacgtatattggcaaatttaaagcaggcaacttaaaccttcagaattcaaaaaatcctaaaattttctgtacgataaaagatagcagcttcataataaagctactatctttatattctttttaactattagctaattttgcaatcctctcatttgaattttttgtaaatactccaccatgataacagatgactgtttctatatcatattttgtgagcttcttaagagattccattgcttgctccatatcaaatgtatattctggattaggaccaattaattcattatttacaacattcattgcgtctccagttaccaatgccttatactttcttagatagagacaaatatgtcccggagtatgtcctggagtataaattacctctatccctccacaataaggaagattctcttcatctttaacaatcctattaacttttgttttaagctgctttatggtttccttcatagaatctggcattgaactcaagcgctcaggagtaatttttataccgattttatctccctcaatataaggtctttctccactatgtgctaacacttctatttcacttttagaatttttaacaatacttgataagctgccgatatgatctaaatcgtgatgagtaataattattttattaattctgtcaaatgatacacctgctttttccacttcttcgcgaatattttctatttgtccaggtaatcctgcatctattaaaattacatttttatcatcccaaattagtgtagcattcattcttctttcttcgttccctaattcaagtatatctaatccttctgcaattttcatctttcttcctcctaattaaaatttatttctcaatcaattttcccatttgactaacaaccattttgtaatactcacctttttcattcataagacttttgtgatttccactttctaatatttttccaccaccaattaccataatgcgatctgcatctctaatagtcgataatctgtgtgctattaaaaagctagtacggtttttcattaatcttaataatgcatgttgaatatctttttcggtctttgtatctacactactagttgcttcgtccaaaattaaaatcggactatcacacagaactgctctagcaatagacattaattggcgctgcccttgacttaagttatctgtagctccagaaaccaatgtttgataacctttaggaagtttatcaataaattcatgagcatgagctattttagcagcatttacaacctgttcatccgttgcatcttttttagaataacgaatattatccataatcgttccggtgaaaagacaagtatcttgaagcacaacagagaagcatttcctaagactatttctttttatattggtaatcggctcatcatcaatgaatatatttccgctgtctgcatcataaaatctagtaagaagattcacaatagtagtttttcctgctccagtctctcctactagcgcaactgtttctccagctttaactttaaaactcacattctttaatataggtatagacttatcgtatgaaaaacatacattttcaaaggttacattcccatttggttgttttatctcaattgcatctttaagatctgcactttcttcttcattatctaaaatttcaaaaacacgttctgctcctgcaagtgctgattgaattgtattaaacatacctgctacagaatttaatggctgtgaaaattgttttgaatagcttaaaaaactaactacagttccaacagctacaccatcccctatggatagcatgccaccaacaatagcaacaactgcaaaaataaagttattaataacattcataagaggcatcatatacccagaccatatttgcgctctattactgctttcatatagattttcatttatctctgcaaattgctttaaaacatcctcctgcttattaaaagcctttaccatctttagtcctaatatgttttcctcaattactccattaagtgagcctaaatttctttgctgagctaagaaatatttgcggctatgcgttgcaattacacgtgttaaaagtataactagaggtatacataataaaacaactagtgtaaggggaacatttaacactatcataaccataaaagatccaactaaagttaaaatacttgatattaactgtgtagttgtttgtgcaattgtagagctaatattgtctacatcatttgtaattctactcattgtatctccatgggaacgtgtatcataaaatttcaaaggaagcctctgcatcttttcaaaaaactctgcacgtattacaaaaacaagtttttgtgaaactttaagcataataacaccatttatccatgaaataagacaattaactccatacaaaaccccaattatagttaaaaataatataagagtcgatttatctacagttcttgttgctattctaaatgtatcaaaagtctttcctacaaaataaggaatcccaacagaaatcgctgatgaaaaaactgtaaaaatcatagctagaaagatcgtcttagcaaaacgcatgtatattttaataatacgcactaatgtgcctctagcatttttagctttttgtgtaggtgcaaagcgatttccgcctccccccacacgtctcccactaatagaaggtacttttacttcagttttagaaaattgttgtgccataatatcctatacctccttgctgctctctatttgcgttttataaatatctctatatacttcacagctttgcattaattcatcatgagttccatatccaaccttagatccattatccataaccaaaattctgtctgcaaacatcgccgttccacaacgttgagtgattgtaatcacagtttgattacttgtttttgaacttaagctttctctaacctttgcttctgttactgaatctaatgcacttgttgcatcatccaatataattacagacgaatccctaagtattccacgagctatagaaatacgttgcttttgaccacccgaaagattaactccagcactccctaacatactttcatatccatctttcatattatttataaaacctgcttgtgccctttcagaagcctcatgaaccatcacattacttgcttcccttttaccccatctaatattttcagcaacagaaccagaaaaaagcattggtttttgcggcactatagcgatactatttcgtaaagaatcaacatttaattctttaatatcatagccgtcaattaaaatttttcccttgttcacatcataaaatcgcagaagaagccatgcaatagtagattttccgcttcctgttggaccaattatagctaaactttgtccacttctaatagaaaatgatagattatttaaagcaggtacaccactaccattgggatatgcaaatgtgacatctctaaattcaatattgccatttaattctttcatttcaccatcatgagaaaaatctccatcacaatcaactatttctttaatacgagcagtagaagccttggttcttacaaatgtattgaatatatttgttatcataattaatgaggtaagaatttgtgccatataaattataaacgctgatatatctcctggatttgcaagatttgctgaaaagagactgctacctgctgaaattacaattattgttccaattccaacagtaagagttataagtggtgacacaaatgtaataacactttgagatgatattcctttttccattaagtttgtatttgcattttcaaacttactgctttccttatcatatgttccaaaggccttgactaagcgtacacctataagatattcctgaacaactgaatttactttatccatcgccttttgtaattcataaaaacgcggataacttaacttcatactaataataataagtatcgatacaatcgcaacaacaccatatataataagactcaatctaaaattaagcagtgttgcaagcacaatactacctatgcatgtaattggagcctttaaaaaaattctcataattccattaacgaacaatataacctgtgccgtatcatttgtcatacgtgtaattagagatccactttcaatcttatctgcacttaattctgaaaaataaacaatcttttcaaataagtcatacctaagatctgctcccattctttgagataccttacttgctaaaatatttcttgtaactgcgaaagaagctccaattgcagttactataagcataagcattccccagtaataaactttagaaagtgatccttgttcaattcctgtattaattatgttagacataagtgttggaccaagcaaatcacaaattgcttccgatgcaacgcaaaaaacagctatcccaaatggaattttatacttattaaaatatttactgtataagttcatatcctttattcctttcctttgtttaaatgctaattcccataccatattatacatcatttttacattcaaaatacaataaatatttccagctgcttataaaactaaatcttccatgtattaataagtttacttttctcaataataactatataacttatctttaagttatttaaatttttatttagagtattttaatatgctataaataattttttagattattatgttaggagtgatttcaatgagaaaaggaaaaacactagatgatcaaacaccaagtgtctatgatactgaaaaaattattgatatccattcatctgaggacgatccatcccttgattcagaaaaagtaagatacgctaacagtcatgcttcacgttcaaaatatactcatggttcaagcgacgtaagccctgttaatacaagcaatccagactctacagaaagaattcccacatcagttagatattctgattctgacatacataaagatgatgatgaatttgactatcaaggtgaaatataaattgtctatataaatcaaaatcaacgacagcatatttatgtattgtcgttgattccatctttatttttcaaataatatgtgttttttattcaccatatttcttatggtacttaacttgaacttctatattaggatgctttttacaaaactggctaattacaaaacagcaacttggacatggctcccatttgctatataaagttaagtttccttcatcttttaatacttttgcttctatctgtttatgtatttcttcaattatctttttttcactatcattgattctgtcatatcctattccaaactcacccaacttgttaactttattacttttaaaaaatgattcatcttttgttggtgcatgacaataatcctttatattattacttccacttatcgccttgaattctttattatcatatattgctactgcaatatttatagaatcctgtaatgtcttactttgatttattttaaatactgatttttcttcttcatgaactttcatatacttattaatattctttattaatcgctgcattctcggtatattattatttagatgttgatgatattcaatagtacctttttgaggcgtaatatactgataatctatttgttttggaacttctatagatattgttttaactttagtgttaatattataactttcttttacccttccttctttaataagaagcattttcttcaatagctcaatatcctttgaatataaataatcattatctatttctttttccaaaatttctaatttctctttttctttttcatttgctattctggatacattttttttaacttcttttatgtcactcaacatatcttcaacatcatctctagatattgcatctcgctcatattcaatcctatttatatttaatatttttattgaatttatttttttccatagcctatcatgctcatattcaaatagtattatttttttcatgtaattaattaaatcactaacattatctgctctataagtcacatcctcttgaccaatacacttatataattcctctatcacgctattctctactttaaaagcattggcaacttctactttaaatttctcttcatcaaagtaatttattttatagccttcttttttcaatgcatctttaaaatcatttaaattattaatctttattcgttctctttttcttctatttgaaattatttctcttttggtcatacttccctcttatgttttcatgattgattaaatatgtattactaattctaactctttaataatttcttcattatatcataaattttaaaatcattataatcaaatatcgatacgatttaaaaaataatcataagattataaacataaaaatatcatgtaaaatttatatggtataataatacttatcgtgaattataatgcaattaatcatacttttgttataaataatttagctctaattatagaaaaaagtagtttaataatgtactaaaataaagaacatagtagaaacatataaaataaaatatattaaatctaataaagattttcaggaatataaagttcattaatctaaaaacattaatatggggtgacagtatgttaaaaaatatatcaataaaattaaaggaggtaaattttatagctctaacaggcatcattattatttcaattatactactaacaaactttgtaaaagttctaaagtatagttattttgaacttattgatgctgataaatatataaacttatcaaacaatgtagagtacttcatccctaacgataatcagtataccgaaataaaccaaatagcagacaatagtgctattaaatttgaaaaaaacaattctaaaaatatctactttcctgaatatgttcaaaaagtctggctaaaactaaaattacaagataaacaagctagtactgataatataatgtacattgattgtgaattcattgaaaatattcaattttatattccaactactgatggaaagtatgtaaaagaaaaacctaatgaatacttcatttttccatatattaatctgcctgaaaatattgattttaatagagacatctatataaattcaacttgggattcaaatgtatttaatttacttctagcaaaggacagtaacttttatatcattcaaaacttgttagcatgtttttatataggtaatttgggtgtgctgctaggaatgcttattatgaatatgattctattcttttcatcaaaagataaaaagtatttatttcattcactttttacaggatcattgctttcactactatattgcttatctggaatgcaaaagttaattctaggatttaatagtaataacaggcttatagcattaggtgcaatggccgcttcaacctgggttttatttatctattcatatttagatataaaaaacaacatgcccgtattaaataagttttttaaactttcaatactctttctcgtactttctctctatatatctgaaattattcctgacggatttacttatgatattttatatttgcacatgatcatagtagggttatatattcttatttcaatatattcttattttaaatttggtatgggatctatatattacttggttggcatatttatactttttactggctttatcatatatattttaggttcttatggtttacttgaatggaatatctttgcttttagcatatgctatcctgctgcctctattgaaaccttattatttaccatcggaattattaaacaaataaaacatgaaaaagaagttaataataagcttcaattagaagttataacagataaacttacaaatatatataataggcgttattttgaagaaacagttgtaaataaaattcttcaacttgaaaaagaaaagagtcttgtatcaatgttggttcttgatattgatcactttaaaaaagttaatgataactatggccatagtactggagatatggttttatctgaaacagctatgcttattaaacagtgccttaggaaagaagacattcttgttagatggggtggagaagaatttgttgcagtactccccttcacagattcaaaagaaagtactacaattgctgaaacaataagattatctatagaaaatcatagattcaaatttgtaaataaaataaccgttagcataggcatagctgaaaaagatgcagttgaagattttcatagttggtttaggcgtgctgataatgccttatataatgcaaaagagaatggtagaaatactgtttgcgtttgttatacaaatgaaataaaaaataattcctagcatcaaaatcactaggacactataataatatttagagtttaaacattcataacgtctaaactcttttattttgctttgcttttagcttcatattctggccatactctttttccccattcatttatgattgctaatgcaggaagtaaatcattacagtgattcgtcaaagaatattctacatgcggtggaatcttattatattctgttctttttataagtccatgttcctctaatgcttgcagagatcgagtcagcataatattagttataccaggtatgcttcgcttaagttcattatatctaatgctctttgaaactgatatctcccatataataggaagcctccacttacctcctatgatttcaagtgcacgaagaacaggacatgctttagaatacttgttttgcgctttttctagttcacctttcataagtaatccccctaactctaaggcacaaaaatgtgcgtacttgttcttatgttccttattaaactataataataacataccagacaaatggtaatatgtaaataagtcaaaatgggagtgtggatattttgaaaaagttattctcagaatttagtattaaaaatatagaaataaaaaaccgtatatgtgtacctccaatggttgtaggtttagccgaagatggatatgtaacatcggaaaatttagcccgttataaggaattagctaaaggtggtccaggacttataatacaagaagctacatgtattaataaagatggaagattatcagaaaagcaaattggaatttgggaagataaccaaattgaaggattaaaaaacatagttaatgcagttcatgaagaaggttgtaaaatatttattcaaattcatcatgctggtgttacaggaatatctaaatctcctctatgtccaagtccatatgaatataaaggttttgctggaacagttattggacgtgaaatgactaaagaagatatagactcaatacaaaacgactatattgaagctgtaagaagagcttacgaagctggctatgatggtgttgaactacatggatgtcatggttatttaataagtcaatttttaaataagaatgttaataaaagaaccgatgaatatggcactaatccagaaaaatttgtaatagaaatactagaaggaattagaaaagtaactccagaagagtttgttgtaggaatccgtctaggtggatttgaaccatcaatagaagatggagtaagttatgctaagatattagataagagcggaatagattttcttgatatttcttatggattctttaatgaacaagaaattaatgtaagcaaagattataagtattccaatgctgtttatgctgctgagaagatcaaacaagaagtatcagttccagtatttgcagttaatggaattaattcagctgaaattgcagaagaaatattaactgaaacaaatgtagatatcgttgatattggtaaagggattcttataaatcctaattgggcaaaccatgctatggatggaaaagataccggaaaatgtttaaattgtgcaaagtgcatgtggtttggtcaatctgaagtgtgtcctggaaaagttatattcgataaaaataataaataaaatgttttctaaactgtaaatttaattgcagtaaaaaagatacaatgcttatgtattatatgcattgtatcttttttgctattttttatttttaattactttaatgctgaaattacttcttcgcttgttctaattcttccaatcctaggaaaaatatatttacaaacataatcatgttcctcttttgtcactgctgtcattgcatcttctacaaatatttgattatatccatgttgatatgcttccctagctgtagtatctacaccaatattagtagaaatcccacctaacacaatagtatcaatacctctacgtcttaattgtaaatctaaatctgttccataaaatgctccccattgtctcttagttacgatgtgtgcattttgagtgctagctatttccggtataatattatcccatcctttaggaaattgcattccattagcctgagaatctatcttcggtttaagtgtatcttttccatctatagatgaaactcttacaagaactataaatgcgccttttttactaaattcattgactaatttgcttgcatttttaactatcttttcactactataaggtgaaagttctctatttacgattccattttgcaaatctataagaactaatgcagttttttctacatcaataaatttattttccactgacttgaagttttccatttcttatccccttttcatacttctctattctatgattattatttatattaagtttattatacactttaaaatatactagcactgcattaattaataacaatgcactcgttacaaaaaatacgcattttattcctaaatatcctgcgatttgtcctcctagaactgatcctgcaaatacacctagatatcctgctgccatactaaaaccaaatactctacctgtaagagcggagggtgtaattttcttgaccaatatattaacagaagggttaagaccaccaactgtgagtcctagtaaaaatctaagtcccataagctcccaagtgttcgttacaaaagcttgaggtatgaatattattccagctattatgagacatattagcataactttatgtgctcctactttatcagatagccttccaagccttggagctgcaattatattagcaaaacctgatgcagaaaaagttattcccgctattaatgcaatatgactcgcttccttagatagttgagtaacataaactgttactattggctctaccgaatacattgctacagataatataaaaaaagttataaacaaagtaatggttaatcctttttccggaactgtattccaaacttctttgaaacttaaaactttattatcttcacgactaaaagattcctttacaaatagtactgtagtaataaatgcaatgagcataagcccgcctgttataaaaaatacattttgcaaaccaaaagtctctcctacaaatcctccaattgtaggtccgagtaaggaacctgcaatgttagctgttgaaatagttcctagagcatatcctgcatgttctttatctgtttgagttgcaattaaggtagtacaagctgtgctatatcctgtgatagctccttgtaataacctaagtgctattaatacatatacattaggtgcaaatcccatgcagcttataactatagccataccaagacttgctctaagcaacattggttttcgcccaaatttgtcagcagcatgtccccaaatgggtgaaaaaatagctgagataataaacgtactaccaaaagcaattccagaaagtctctctatcgaagccgcatcctgaactcctaaatgctgtatatatagtggtaatactggagctatctggctcatgcctattcctgtcacaaacattccaaaccaacaaacttttaaatttcttttccacatttccataataaatttattccttcttactaattagttttgttattgcaatgcaataacttatacattgtcttctaaatataagaataaactataaaatataatttgtaaactacattttatagtttaataattatttccaatttgataaaaataacctatcatgttaaactatctttattaatcagaattataagaggtgataaaatggttcagaaacgaaatttaactaaagaaaaaattattgaagcttcttttttactagctgatgaaattggacttaatcagattactttccaaaagattgcagaaaaactggatataaaatatccatctttatataatcattttgctaacattgaagatcttaaaataaaaatgaccatctactttttaaataacttaaattcaactttaatggagcgactaatcggaaaaagtggagaaactgctattagagaatttgcttatgtatatcgagattttgcatttgaaaacaagagtggctataagctttacgtgaatatcccaagtactgaaagtgatgaagttaagcgcttagctagcgaaactaatgcaataatacgtaaaattttagacttttatagcagtgataaaatatttataattcataaaagcagggctttaagaagtctattacatggattcgtttccttaagctctcacggatattttcaaaatccagtcaacttagaagacagctttaaattaatgatagatgactttattttatcaatatcagaaaaataactaagaaacttttaaatcttaattcaaaatgttaactacatatctatattacaaatgataaattctatgttcagttgttattttgcaaaataaagcagcatatcataatgtaaattttgctatgctgctaattgttatattatcttatttaattatttgctctatatattaaactttccaactatttgttccaatttatccgcaatattcttaagctctattacagaatgtgatatcttttccatggaattagattgctctgaaacagttgctgaaacttcttcaattgaagctgctgactgctctgctacagctgaaatttcttgaatgctgcttattgctgaatctttattttcatctatggactttatattggaagttaactcttctatattttctatagtatcatcaaatgtactatttataagttggaatgtattaatagcttctttagtagttttgcttacttctgtcattatagttctttcttcatccatacttttcttagctgcatttatctctcttataatttcatttacaatgctttctatttcctttgtggaatttgaagtctgttctgaaagttttcgtatctcatctgctacaactgcaaatcccctacctgcttcccctgcttttgccgcctcaattgctgcatttaatgcaagaagattagtttgttctgaaattgcttgaattgtatttattattttgcctgcagatcctgatttattagataataaatctatatttctaattactttttccaaagcttcattattagcatttatattattcataagatcctttgaagcactaatcccttcttcgctaatatgctgcgatttttttgaaaactttgttactaaatccgcattatttgatgaaatgtctattttctctccaagatgcaataatttttcagaagtaagttctgtattccttgcttgatctaatgcgccaacagaaagctgatctaccgtttcagaaattccctgaattccctgaagcgtttcatcagttgaagctgcaattccttctgaatgatcaagtaactcttttgatttttctttaagaacttcaatagtttcccttaactcttttcttagagatgttacagctctagctataattccaatttcatcttcattctgaagtaatttctcaaattcatcttctttcttcatttctaaatctaagctagtagttttatttattaaattagtcaccaatgaaatcggtctggatattttacttgcaaaatataaagcaaccatagaaaaaataatcatcaaaaatacaaacatggcaataaaactgataattaaacccgttagtggttttaaaaattcagcatttggaactgcaatacccattgtccattttgaagaagtaataggagctattgcaaaatatttatttattccatcataatcttttagctttacaacattagattcagaactcccctttccaaccatgctacttaaacttccacttaatacatctctaatattctttagtttatctgcacttggctgaaactctttatttggatgaatcacaaattcatctttttcatctaataagaatccataactgttatttataggctgtgccttctgaacctctttagagatactttccatatttatgtcagtacctaaaactcctatgactgctccatcctttttaattgattttgcaactgtaacaactaacttcttagtttcagaatctatgtatggatcagaataaattactgagtcactttttaaagcatctttataccacactctctctgtacaattaaagtcattatctggtatccatccatcttcatcaacaaagcttttatcttgaaaaccaaaatatatatccataatatcggtatttgactctgctttaactttcatatatttcaaaaggtttgtactatcataattattgttaaattcgatgttttcagctgtttcattaacaaagtttccttgattagccatccatttgtctatagtttctgcatatttttcagatagtacccttagtttatcctttgattcaaccacagtggttttataaaacagataataacttatcgtcgaagaacataataaactaaaaaaacaaactgctacgaccaagagaataacttttgtcttaatgtttttcattttaattcacttcctgtttgattttaaaatttgtataacaatgttaaacataaatattccttataaccaatatattatatgtattgatttctttatctttagtaacatacacaaacatgtaaaaatactattaacttaagttaagtttcttaaatagttaatatatttcatataattcgccttctttctacaaaattgttttaattctaatatatattctagagtatactcaaagtcaatgtataacttttacatatttggattttacaacgaactatttcataaaataatcttttatttattattttataaaatcacaaaaacaagagtatagatctccatgttcacagagatctatactcttggttctttttaggtttataattagaaatattaattttacttaggtttaatagttgtttgaataatgaataatttcctattatttagctaaccattttgattaattaaatgaaataggtaattctataacaactttggcccctccaagtttttctgattttgcaagtgaaatattcccgttttgtttttccataaatttttttgcaatatataaacccataccataattatttttagaatttctactcttgtcgccttggaaaaactgctctgtagccaactgtaattcctcttctgtaaatcctcttcctgaatcttcaatggtgaatcttatattatcatcatctgaatcaaccccaaatgttatttttccattttcagagcaatattcaaccgcgttcgaaataacattgcttaaagttcgttttaaggctgattcatctgctataataaattctggaatatgtttaatttcacctttaagctctatttttttatttatccccatggaaattccttgttcaattatatcctgtataaatccttctaaatttatcttctttttttctaatgttgattctttctcagctttcataatttctatcaatgatttaatataatcttctatatttttaacctcgtttattatactatcgttaaattcagcttgatctgcttttaaatctaattcacttaaaagctcagagtttcccttaataattgttaatggtgtctttatatcatgagccaatgctgccatttgctctttacgagcttcttccatcttccattgtttacttaaagaatcattcaactctgtcttcattttatcaagcgcagaaatgacttcattgatttctaatatattcgaatatttcacctcaaattctaagttttccatctgtatattttctgtagtctcttttaaaacatttagttctttagatattcttcttctaaagcatctagatagaattataatttcaatactaaacaaaacaaaatatataaaaacaaaactaagctcagcattttgaacatactttttcaaaacagggctaacaaaacttgcccctatggtgtattcaactacacatattccattctctcttgaaataactttgtaataatatttcccttcacttctcttatcactttgcacaagattccaaatatctatagctttagtttctgatacattgctataaaatacatttccaatagaatcatacactatataattacactcatcaggtataaagtcttttactttaacaccctgtgcttttgctatttcttctctctgtttttcaattttctgctcatagtagtttgctggtaaaataaatccactatttaatccaatttgaaatagaataaaataaaatatagctaaaagaattgtaactatacaaaagaacattatatatattgcgaaaatcttagaaatgcttttttgcttcctcactctttccatttatatcctatcccccaaacagtttctatagggtttattcctaccttcttaaacttatttcttatatttttaatatgttccacaatcgctgtagtatcgctacttccatcaaaaccaaatacactttcatatattctctccttggaaaatacctgcccatgatttagagcaagatattcgcatatattatattcactttttgtaaaaggtactaattcttcattataataagcctcttttgaagttatattaaattttatatcagaaatagaaaaagcattttgtttttccctatgttcacgtcttaaatgtgcagctacccttgcccgaagctcacctatgccaaaaggctttgatatataatcatctccaccaatgcttaatcccattacaatatcttgttccatagtttttgctgtcaaaaatataattgggcaatcaaccagactacgtatctctttgcacagagaaaatccatctatctctggcatcattacgtcaagtaaaattaaatcatattttacatactgatcctttgatatatcagtaggattagaaactatagttacattatgtccttctctttctaatgcaccttttataacctttaatatgccttgctcatcatctatcgctagaatatatgccatttccatccctcctacatctattatacccaatattgccagctaatctttattattctataaattattattgcttctctcccctaccttcaaaaaagttaaaccaaactccaagataaatcccaacggcgattgtaaatagaacacaatttctaataccaatggcactattactaaatacgatattaatatcagccagtttattaaaattatctatagaattagaagcttttataaagaaattatcacaaaacttaaccgaccatccacaaggtatccattgccatattccatctccaagccctgtactgagcaaagctgataataagctttcaactattcccatccctattgatgctccacttccaaacttaatgctcaaccataagtgaaataaatagaagaagatttgagctccaaatataataaaaattatatttaagtaaaaatttagtggtagtgtattttgccttaaaacaaattgaaatccggcggaaaaaatgccaaccgctacactaagtgaaaataaacctgtaataagtagaattaatattttactcaaaagacacattccttttccatattctatagatagcatttctttaaattttccagccataacctcctgttctataaccatggagcatacaatccctattaccactggaaatgttattgatagtacttctaaatacccacttattttatttacagaattccaatttgaaaatgaataatattttaaaaatattattgctcctataataggtaaacaaatatgaatccaataaaaaggtgtgtgcttcatttttataaagtctgatttcaataaacgaagaattctcattatgttactttgcctcctgtctatcataccatttagctgttaaataagttatcaatataaataaaactattgaaattccgataccaagaggtataccccaactcttaagtagctctggtgtaaaagtttgactttctggtttagctattaaaccatttggtaataattttaaaattggacacattagtctagatgtatacgaaaagggatttatccaccaaaactcctctactgccataactattgaaaatatattaactgctaggcttaatactatagttggaaatagccctattttatttcccagaaaaaagtataatggaacctgccacattgaggttataatgatcactaaagttccacctaaaccacttaacatcgaaatatgtgatatactatccattttaataaagtacacacttaactctccagctataaaaatgactatacaagaaatagctatattctttactcctaccaatattttagcgatccatattttatctaaatctactggaagtgttataaccgccttatttttcatagaaccatcaatccttgataaaaggcaactgcctagcgagataactccaggaagtatcgacgtataccaccaattgtaaatatcaacctgaaaataatttgatgctaaaaatcccgaaagaagaattaccataattggtgctatccataccaatttcttcaccaacgtatgatttatcttcatattttctgaaataaaatatttaagcatcattatttctccctcctatattttttagcaatatccataaataatttttctaaatcttcgcctttttttaattctccctgatatcctaagataccaccagatataatcccaatatgatcagcaatctgctctacttcacttaacatatgactggataatattactgtaatgcctttctttggaaaagatcgtattaactctcttaattcttgtattccaaatggatcgagtccgttagttggctcatctaaaattaaaagtttaggattattaagtagtgcaatagcaatccccaatcgctgcttcattcccatagagaattgtcctgctctctttttgcctgtatcttcaagctctaccacatgaagaacttcttcaattcttgagtccggtaatccaagtactgtagtacgaacctttaaattctcttttgccgtcaaattttcatataaaggcgctgattctattaatgacccaatttcgcgtaaatcctttctactccatttatgtccatcaaataagatttctccagaacttggtctaagcattcccgtaaccatctttaatagtgttgactttcctgctccatttggaccaagcaaaccatatattgaattcgctttaactgatattgaaatatctttaactgcttcctgctttttaaagtttttacataagttttttgtttctaaaataaattcgttcatcttcactcctcctcttataattaaataataatccttaattataaggaatttataaggaaccgaaatttaagaagctgacttgtatttaaaaataaaaatccctcagtaacgctttcgtacggcattactgaaggtataatttctttagtcttcaatttaatacatataatattttataaatatacatgttgcaattcacaatgcacatttcgcaattcacaattacagctaaaattcttacaatatttttagaattatgataaagaattatttttgcaatatatatatatttttctgaacaataaattattgttctttatgctattttatcattattattataactatctctaagttttaagtaatagttggctacagtaacgttcatataaggaaccacccataataacccgatacatagtggaatcattccaagtattatccaccctaaaaaacttaaagtaaggacgaagtattcaaatttatgccctttcataatagctgagctctcttttaaacattgaattattgacttattattatcatcagctaaaataaaaaatgattgtgaaaacatatatataaatataatgcctggaactatcaataaaaataatcctatggtaacaattatagtcaataaaatatataggcctacagctttatgaattattgaaaatcctgaaaatatatctgtaaatttaggtttactatctttttcggcatagtttagagaaaatctgcatactccaactcctattgatgcactaacaaatattgttactaaaaatattattaaactcaaaccaaaactttccctaacaactcttaaaattaaattaaaaataattggaattagaaatccagcaacaaaaattcctccaacagccagtccccacctcccttttagttgatctttggcatatcttttcagttctgccctagtattcataaaaattcctccttaaattgaaatacctttgatatttatgcagggagatttaacattatgctatatttatattttaatttacagtaatcgcatgaatttataaatatacattaatcttttgtataatttatatactttttgtaaaagttttcatttgagtgatccataatttcaacataattatatatcttgcaattaacttctatattaatatttcataattaaagatatatcacacaatttgcattagatatcagttataaaactgtaaataaaaaggctattataaaataaatttttagaacaacataaatagtctttaataataaaaacagtacttatattgttctatcttttattctaaaacagccacttttattttatattacagccttataatacagctaaaatttcatcatctttctgaatataaagctttatcttactaattcttttttcctttacttcttctattttaaagatcaagttttcatattctatctcttgttcatctgtattactaggaatacgttcaagaatttcaataataaaaccactcatagtatcataattctcacttttaatatctgtatcgaagtaattattaaaatcattaattgaaagcatacctgatattataaaagtatcattatctacttcttctattgatggctcatcctcatcatattcatcatctatatttcccatgacttcttctattaggtcctcaatagaaactatacctgaaaatcccccatactcatctactaatacagcaatatgctttttagtactttgaagttccttaaataacgtatcaatctttctattttctggaacaaaataaggtggatgcaatatgcttcttatatccacattttcaaatccatattttcttgcttcactaaagaaatccttcatataaagaataccaattatattatcagtatcatcttcgtaaacaggaactcttgaatatctttcatcaatcaattcatccaaatattccattaatggctcttctatattaatcatatatacttctgttctcggtgtcattacttcacatgctaatttatcatcaaactcaaatatgctatttatcatttctgtttcagtcttatttatgactccatgttctagtccagcttccacataagatctgatttcctcttttgatactttttcacctaaatcctctttatcaaggccaatcagtttaactaatatattagttgatgctgaaagcaaccttacaaatggaactgcaattttagctataagcactaatggtcttatacagaacattgcaatagcttctgattttttaagcgctattctttttggaaaaagttctccaaataccaaggtaatataagataatacaattgttactaatgctaaggcaacttgtccactataaggaacattaagtccctttaaataaagagctacatcttttgatagtcctgttgctgctgaagcactactaaaaaatcctgcaagagttattcctacctgtacagtagacaaaaaatttgtaggctcttccataagtttcaataaaagcttggccttcttatttccttcttcctcaagaagctttattttatttttatttaatgatactatagacatttctactgacgcgaaaaatgcattgatcaaagtcaatatgactattaaaattaattgtgacgtgatactcgtctgttccgggtctaaatccataaaaacatttcctccaacataaaaattttttaatataataatatcacaagaaatatttaaagtaaaatttcaattaattcaaatattccttatttacatataatattaagtgttatagtaatttgactcactaatatttaaattttataaaatattatattaatactgggatttgcatatgcattaattaacttatttccttaatataaatcgtttattatattctttttcattaatactgaactcaagtcctgataattcttaggatttatacaatacatttatattcttatttgttggtgaaataaattttactgactattaccttaaagatgacaagttaagataattgactttttaattgttctttatcaattgtatattttaatcttttaatttcattaccatgatctaacacaattatttcaggtacatttctaacattatattttcctataagatttttctttgtggctatatttacttctttaatcctataataatcaaataattccctatttacctcttctagcagtgttccaaattttaagttttcattaactaaagcatctaaaaatagtaataatattcttttttcactttttagaatactttcattaaagtcatttaattcttcaatgtaacgttcagccgctacagccgcagttgctccatcaccagcagcagaaacaacctgccttaaatatttaaccctattatctcctattgcataaactccttcaaagctagtctccataagctcatttacagatatatagcctcttgaatcaacttcaagaccgctattttttagaaaattagttgatggtaccatacctacaaagaaaaatacaccttggcagtttatctcttctatatttccagtctttaaattcttaatttttactccttctacattttcattcccgaagacttcctctatggttgaattccagataaactccatcttttcattattgagggccctttcgctacttactttattacaatctagaatcccttcatcatgaagcactataacagtcactttacgagcaaactttgtaatatacagaccttcttcaatagcctgatcaccacttccaactactacaacatgttctccttcaaaaaactctgcatcacaagttgcgcagtatgctactccattgccttggagtctcttttccccagggatgtttaataatctaggttcgctgccacaagctataatcaccgccttagctaagaattgctttccttttttagtggtaatgagtttttctcttaaggacaaatcagtatctacaacttcatctcttagaaactcaactccaaagctctctgcatgtttcttaaagtttttcataagttctggcccgctgatttgttcataaccaggataattaactatttcccttgttgtatttacaagacctccaactcctcctttattaattacgagagttttaagtttagctcttcctccgtaaattgctgctgaaagtcctgctggtccaccacctatgataattaaatcgtaggaattaatcacatcgtccatacttttaatcactcctcaaaaacttcagcgattttttcttcaactgcatcaccttccacatgaccagctaatttcccttggtactcaccgtctttaaaaaacagaatttgaggaacaccttttaaagaaaatctctgaaataaattcttttgttcttcaacgtcaacataataaaaattatacttaccatcgtatttggactttaaatcttctaaaattggtactactccttgacatacactgcagctttccctagaaaaaatcactagactggattcagcattgtcatatataacttcatcaaattcattagaatctaaatgttgtaaagacatactattcactcctctataattattttaaaaccgtaattttaagagactataatgccggacaccttataatgaatttattaaataaattcattataataataagcaaaacttctatgcgcttattacttagttttccttataaattttctgcctattttaaaaagcagctatcagagttcttactttccgatagcactaattttttattaaaaaagatgaacttgttattttttcggatattcctaaatatcttctgagaaaatttgataaattggagctccttcacactgtgctggatatcgtaaacctagtaatacagaaactgaaggtgcaacatcaacttgccttataatacgttcagttgtaaatcccttctttatacctgaacctgctgctacaaagattggtgaaactgatgtatcaaaatatccttctgaagtcgaaaggctatctccgtgtagtctattatatttttcttctatagagaagaatatatcaccacattctggtccatgtgtaccaattaatacagcatctttatttctaaggcatatgcccacaacccttttaccagttttatcatctctgtaattatacaagtcagagattatttgttcttctaaatcatatttatcttttagatctacaataccatgtttgtcacggccttttagattaatataaatataattactacgaatctggacagctcttgttttctcccaatctacttctcttgttgaattgccatctttatcttttttcaaaactgtataaccaagctcttccataacttttgtatttaatccaccatactcacctaaaattggaggtacattttctccaaccataagcccatgatcgcttacaagtaatacagtccagccctcatctagtagatgcagaaattcaccaatataatcatctgtttgtatatagaatttttcaataaattcctgatatactttttcatcagtgtaatcccatggctcaagcgtcttagcaagatgccataattgatgtcctgcacaatcaatattatgaagatgagagaatactacatcatattttttctccttaatacaataattaagacaatccgcctgccacttatcgtaaattgcccaggatggttcaaagattttcctcactagttcatcatcttctccaccgattaaactaacaggagtaacatgtccaacattctcagtaatatctttgtataaagatttttgatgccataattgatcattggatatgtcaagagcattactaatccaaactctaactttattgccttgtggatcgagttctaaaatcttcattgaacggcatgcaggctttgttacttctttctttgtaacatcgtcaatgatacctgttaccatcttatctttctctagaattacgattggtttatctgctttcttattcttataaattgctactttatcatattcaccagcttcatttttaagaattaaggccggacgcctagttacaccgctcgaagttattatagtgaattcttttgctccttctggcgtgtttttccaatcttttgcatctttaagtggagaatttacaatatcataagctactttacttccaataacaatttctgtatcattatcatccataacataggtacgaatttcaccgccttgacgagctgtatctccccaccaaagttccatcatttcgtcatcaacttcatcatctaaagtgccttctaaatctgtaattatacaaccaacacctgctggtttttctactcttggtgcatagcgaacctcttcaatttcaggtgaagcaacaataactttttcccaatcaagttgtgcaactcccatattaacagatcctggctgagttccatcaacaacacttaagttttcactatgagaagttggtggccaagaactacctggccaatgccaaactaatgtttttaaatcagcttctgaagtaatattccaaatctgttcagcagtacagttacgcgaatccatattataaacaaccgcatcaagactttcaggagattgtctccaatagcaagtaattccatgtgttcctggataagcgcctgtggcaagtgttgtccaacaaggcggtgtaattgttggtattgcaccaatttgtcttaagtcacctctagctgaaccacgttcaatcagtttttttaaatttggcatttttccttcttttaaaaatttttgactcactcttggatccataccatctacgcctaagactaataatttttgagtaagtgcttctcttttcataatatttatctcccttcaacaattctgctgttaatgtacctttatcaataggataataaatcaaatatttctattactcttaatattgatacttatttttgtgaatagattgtgcgctttctttgatatagcgtataatctgtcaaacttcattttctaagtcatttccttgaatcaattctattaacgagtctctaagttctccaaattcttctgaagatctgattttttttaagctattatcatcatcttgttgaagtggatttttaaaatcactcacaattcttcccggattggcattcattacaataatcctagttgataaaagaatcgcctcttccacatcatgagtaataaagaaaaagcatttgttagtctctttccatatctgctttagatgtttttgcatagcttctctagttagagcgtctaatgcactaaaaggttcatcaagcagaactacttttgaatctgcagctaatgttcttgcaattgctgcacgctgcttcatacctccggacaattgatgaggaagcagttttctagctttatctaaaccaactaagttaacataatgatttacgatttctgctctctcttttttaggaatcttcttcatcttaagtccaaattcaatattcttttcaacacttaaccaaggaaagatgttaggctgctgaaaaacaactcctacatctggatttggcttagtgtgcggtgctccatttataagtacttgccctgagatatctgtattatatccagcaatagcatttaataatgaagtttttccacatccagatggtccaagaacacaaacaaaatcatcatcaaataatttaagctcaatgtcatttaagacattcgaacaatctcttccatttttatatattaagttaacattttttaattcaacagagcaatttgcttttctctcttctggtctatttatctcaactaacgattccatattatatctcctctattaattatataaatcgtttcttacagccttcttgaaagtttcgatatctggtgaagtagtaactgctttttgagttaacaagaaatcacttgtatcctttaaaatttgtggtagtttaccttgcttgtctgatgttcctatatattgtgcttgctcagacttatctaaaacagaaatttgattcatagcttgctttgtatcctcagcgcttaatccaagttctgctgataatgtttttactacatcatctgattgagttttatatgacttagtagcttcatctaatatatcaatatatgccttaactacatctggatacttagctgcaaagtcattatttacaataccaaattcaccagtaacagctccgcctttagcaacatcttcagatgaaagtattacttttccaccatctgaaactagctttgattgtgctggctgccaaatgtaagctccatcaatttcccctctgctccatgctgctataatgtcttgtgcactcatatctaaaatagtcacatcattttctgaaatattattttgtttcaatgcagcaagtaagctatagtgtgaagttgaaccaaatggagttgcaatttttttgccttttatatctgctacagacttaattccagatgcattttttgcaacaagtgcctcacttgaaccgattatgtcatgtaaataataaattttataaggaaggtcattaacaattccagttgttcctggaggtgtaccaatggttgcaatatctatagatccactagccattgcagcatttatatcacgcccaacatcaaattgaacatacttaattgaaactcctgggaattttttttcaagtaacttttctccttttgcaagaagttctccatttggagattgaaaatatcctaaacgtatctcttttggcaaagctgaatctgaggctttagtatcacctgaagtactaacagtttttgctcctgaacaccctgttattaaaatacaaacggataaaatagctgacagaagcactgtatattttttaattttcataaataacactcctttaaatatctcaatgtacctgcttgtacattgattgattttattaataatctactattattcaatataaagaactttctatttttttatttttctagccatggtgaagctttcctgatcaaaaatctcacgaaagaatctaatataattgctataattcccataattataactccaacatagacaatatcatttctaagatatttacttgcatctaataccatccaccctattccggatacagctgcaaccatttctgctgcaactaaagttgcataagcaacaccaatagctgtcctaaggctagttaatatatctggtaaacatgatctaaaaataacactaataaaaagatttattccacttgcccctaatgatttagctccattaattctatctagtggtaccttttgaacgctaaatataacccctattaataaaggtgcaaatgcatttaaaaataataaaataattttagattcatctccaattccaaaccacagcacaattaatgtataatacgctagtggtggaagtgggcgatagaattcaatgaacggatctataatcgcccttacaatccttgaactgcctgcaataagtcctaaaggaacaccaattattatcgcaaaaaaaatagcaatgaaaagtctctccatacttattgcaatatgagataacaagctttctcctttataaccttgctgaactaattcaataaatacctgccatactttttgaggagatggaagaaatacttgattaatcatgcctttacttgtggcaatttcccatacaataaagaaaatgactacagaggtaaaagaaattccaatataaaaaatttcacctctttttcttttaactattttcgtagctgtgtcttgactattcatataggttaatttccctcccccatttctttttacatatatttttcatacgcatcccctttctttacttttcctatataattactatgatttaattttaaatatatcttactaaaccatccaagtattgtcaataaaaaataccataattcatatcagaaaagtaagatttatttttccaaaaaatatatagtaacttgaaatatgtttatatattaatataaatcctgataatatcacacggctcgagaagttcaattattgaacaatgtaatactatcattgttcaatgttcaacacaataagttcatgtatttttttcacatttatagtaaaataattgtgctatatatacttattaatttttacaattcctatactacatatacatacatattcaatagcttctcttccagagaaagaagtttttaataatgcaattacttcttatcatataatgctatcttctcaacttattaatagaaacttaactaaatcaagtaaatccccaacagtacttttttaagtagcgttggggatttatcagtattaaaataaaatactattatttatataatctaacctatttattttactttagataactaatctaaattcttataataattcacttgtctttttcgtttttaacttttcttaggtaaacatataaatcactaattactagatatttttcctgcaatgcatatgcttactatacctatagttaatatcaatattctatttactatataatattcaggagatatcgtataatagaaattatacgtatttgctccaatagataatattttaaataattcaccaaaagataaataatcgcaaatagtatacgctgtcgttataaatattccagcatatatattttttgcagctgttgttattaacaacattattgaagttaaaaatatgatattcggtatgaatcttagtgatagtaagacaccttgaatagctccgtaatacactgttctataatacattaatgctgttataaatgaacctactgaaaataagcttgtataaaggaaccatctaaaaaataatatgtagttaaatccatgtccactaaagaatgcaattaattcatgagcattatttttatagtcattataaaatgtataggctattatgcagcatgaaatcattgggattgtataatcatacatattatctacgctaactagcttgtatctttgtgataacaaagatatatattccatcggcgctggattataaatagatattagtaataaaaaaaatattattccaaaagataatttgagtattcttcctctaatatcgtaaattgtatagtaattactataaagaagttttacatttttgcaaaaatacgtacgcattttctaacgaaacctccttttctaattcacttttctctataaaattatcattggggataaatttaatttttatcatattattttccaatcttttttcttcaattacaataacctttttattaattagttttaattcatcaacgttaacatttatcgtacaaatactatttttagcttgagctatagcatcacttgtacttcctttaaatataatcgaaccttgatctataattagaatattatttgtatataattcaacatcttccaagatatgagtagaaattagcactattctttctttccctatttcagataaataatgtctaaattctaatctttgctctggatctaatccaactgttggttcatcaattatgactatattaggatttccgattacagcttgtgctatgccaagtcttcttttatatccgcctgaataacttcctattgtcttagatataatcatcttcaaattgaattgttctactactttatcaatatgttgctttttctctgtagaatctacatttttgatatcacatacatatgataaaaaatcatatcctgttatattatcatatgtatcgaaattttgtggaaggtatccaatcatattattagaatcccttaatagattttcattatttaaaagtacttttcctgtagatggtttattagctccaataagtactttcattagtgttgtttttccagctccattagcccctaatactgacattattccattactgcaagaaaaagatatatcttttaatatattttttttattatatgaaaagttgatgttttctactaatagttgattattcattttataaatccctctaaactatatataatttattaataatgtatcattagatatttttatataactgttagcatttacgtgcattcctacaatgaccttcttatacttcttttctcttaataattcaaaatcacctttagaaaattctttctcatgctttgttaaataagataaaatattcttatctaatttatccttaaaatcctcaagattataagtacttgggattacatattcaataccattatcattaacactcttgtattgacctgcaaataaatctactccagatgtttttccagttaatttgtaattattgtttaataaattataatcttgacgctctacgtctaaattagaatatatattagacgaggtgtttatatttatattgtaagctattggcgaattgtcatataaacctgggtaccaatgcaaggaatctgtaatatttaaaacatggctattacaatagaaagtatctactcccaatttatcttccacatgtatatcaccttcatatgaaactgaaacattaatacttttcttttcatttgactgataatctaatacaactttacctttctcgtgtgtgaatttaacaggctcattatctatctttatttcttttatcttgaataaatcatctagtaaaaatgttattgaatttatattctcatctatatttacattaaatgaagtattattctttaaattattggcaatatttatatccattttataggagtcaatatgatatttttccgtatttagattagaaatatcatacttatgtatatatgtaacattattgttactaaaaataatagtaaatacaattaagagtatgattgaaataaaagcaataccacttaatatttttctgcttttatccaataatatcttaactataataattattagtaatattaaccacaacacaaatagcttgtctagaatatatgaaaaattaaatatttcatcacatagaatattcgtctgaatacttgtagaatcactatatatattgaaaagtttattgagaacttgtgatttaaataaaggattattcaaattaaatggaaagaaaccataaatagcaagtgataaaaaaatagaaatccatctatttaataaaattccaatagatgcccctattgaaattgatataatatttgataagttccatattataaaaaaatttaaaattccagtaataacgaaatagaatccaatattattatttttaaaagcaagtattataatgattggtaatattgatgtaattactgaaatgatagatcctgacattataatcgttaaatatcttttaaatttatttttttctaaaaagtccataacttcagactttttagatattatagacgatgtcgtaactaaaaaaaataaatttgaagcaattatagcatagcttattattcccgtgtactctagtatagataaatttaatgattttaattgcacgataaaaatatatatattaaataatagcgaaattataaaaattggtgttctaacaaatattttagtataaaatttagttaattttatcattaatctattcctctcacagctataacttaataaagtaaaatgaaaaaatctattttatttacagccccttcatcaaattttcgtttaacctatggttttttaatatattttaatgttcattatcggactaataaattttagatcctccagataatcttcttttaaaggctttcttaatatataaatatttgatcttttctatattttgtatatctctagtagtttacaattaaagcttccattcggacattctctcctactaacaacattcacgttagaaatacctaaaaaagtagggattactttatcacaatccctaccatataagatcaaatattttagtctatacctacaatttttaatcttgcttgagaaccatcactatatcctgaccatctcatatagtattgacttgatccatctgcagtgaaatcatcattatcagtatcttttccactaacatttttaacagaaacacttgcaacagttttatctgttccgctggatacatattttctagcatatccatccccagttcctgctttcgcaataccataaaaagtagcttctccagctgctattacttttctttcacttctattgttatcatttgttcccgaaaaaaccttgctcatatatgttgtatcagcactagctggaagcgctgttactactgcccccataactaaggctacagctgcaagtttagttaaaaaattttttttcatatatctttcctcccacattatgttttatttgtaaattaatctattattattaaattacttacaagtgaattctctcataatataaaaattaaataaatactttttcctttaaacatacaaaattatgcataaaaaggaaaataatcataaattttcttatattttcttaaaatattctttttattcctgaatatatacgttttatgcgtaaattgaaaaagtaacttccgttttctaagtcaaacggaaattagttatacaaagagtttgatataattaaaatgatatttgtccttagcatattaggaggattaattatgtcaaatgaagatttatgcaaaggaaaacaccttaagatagaagatcgacttataattgaatacgggctagatgaaaattacacattaaaggaaattgctgaaagagttaagaaggacccaactactatctttaaagagatcaagcggaatagatttctcaaatcaagtaaacgaaaagaaaataatctacaatcatgcaagcaccgaaaaagttgcacaaagacaaacttgtgtaatagtagctgtggcaatcaatgtaagaaatgtaggtttataaactgttataggacctgtaatgaatatttaatcaagaagtgcactaaacttaaccgctacccatacgtctgcaacagttgcagtacagtcactacgtgcaccgatgaaaagagctattataaagctaaagttgcagatacaaagtataaggaactattagtcacatctagagaaggacttaatataacttcgaatgagctaaaaaagatagatgaattaatttcaccacttattttgaaaggacagtcaatatctcatatttttactcatcataaagatgagctaaattgctgtgaaagaactttatattattattttgataaaaatgcttttgcagctagaaacattgatttgcctagaaaagtgaaatataaacctagaaagaaatctacacttcctgtaattaaagaatcaactgatagagttggaagaaccttcaatgactttgttaagtttattgaggataatcctagtattccaataatagagatggatactgtacacggcacacgaagtggcaaagtgcttctcacttttatgtttagaaactgttcattaatgctagctttcattatagataactgtagccagacggctgttaaagacaccttagacaagctatatgaggttttaggccatgaagtatttaaacatagctttcctgttattctaacagataacggctcagaatttaaaaacccagaagctttagaattagatactgaaggaaatcaaagaactaaaatattctactgtaaccctatggcttcttatcagaagccgcacgtagaaaaaaatcatgaatacataaggtatataatacccaaaggaaaatcttttgatgataggaatcaagaggatattaccttaatgatgaaccatattaatagtacagcaagagctagtttaaacggaaatacaccattcaaactagcccaaatgttgttagatgtctcaatgttagacaagttatcattaaaacatatccatgcagatgaggtacatctaaaacctgcactatttaataaataatatatcaaaaatttagggcaagtatcagcggaacttaatcatgcaaagttgaagcaaacggaagttagttttgcaaggcgatttccgtaggcttattaagcctgcttataaaccctaaaaaaatattatattatgaaaattatagcttattttaagtctttttactactaaatttagttctaaaaactgactttacccttgcagttacaatagctcacgctaaaacggaagttagtttttcatttaacctatacgttttatgatacagtatttgctttttaccaactaaattcaattttgggtgatttctatttatatatttttacataaaaaaaatgcttaaagctcctattttgctctaagcattttttatattctaaacattttataacttacttttttcacagcagtaatatataagaattttagatttaaatttcatcctagttatttcccgaataactcattgatttttatttttgaataacttttcttgcttttcatctgaaaatggcgaatacataacctgataatttccttgcatagtcaataatcaaactaaagcttgctgatggaaatattcctttcctatgtaatattttatctattaggttaaaacatatatctgcactagaaccgaaagttgcaactacaaaaatatatgcatctttgctctcttacagattttctataaactttcttaccatatgtggtatgcctataaaatatataagatacataaaaattatataaaatagagacagcactgtacaactaccttgctctctctatttcttaatttttattataaaaaatctgttactctaattgcatctaatgcaatttatacaccttacagcagcttcttttgcatcttggcatccttcttgtgcaccttcttggtatccttgacaatacccttcttcacgtcctgcttctactcctgcacaatatccatctttgtatccttgattataagcatcttctaatgcaccagccgaagggtaatttctcctacaatgacattgcacattttccccaagagttccattacaattgcatcgtacattttctccaagagttccgttacaattattattacttacagctccaagagtattagaatttctatatcttcttctatgacatctgtatcccatttcttttcctccgtaaattatcaaatttataatcttttgattaacttctaattatatactatgctaatttactatatttgttattgcttttacgatatactctctaataattgctcataaaatagaaattccgcattttcataaatattaataaaagttcaacagtagttgcgtataaaaatttcaactttacgtatactatgaatgggtttattcttaaacctaggcattcattctttgcccctttattggggcttttttaatatatacaaataatactaataatataaatttaatctatatataagtgtatgtaattctatgaagaaaatttttcactataataagaatatcgttatctttatgttaaaagataatgttgactccgaagccactcgtgccagcaaattaatattctatgttatctttatataatttgtacaatctttaaacaagcaatacagcatatttacacatttctcaatacacaaatctatgtccttaatttcatcatcaaatttaattctatggcatacatcatctgtaataaaaagtgaataatgataaaatattttttcatcttctttacttttaaaaggtaaagacaaagctttgaaaatttctttaattttatcttttctctgctcatcatattcttttctcaaagcagctacatctttatctaatagtgttaatgcttccatttcatcatgaaaagttttagaaaagtcatgataatctaacatcatctttataaatactttaaatagttgttttactactttagcattatcaaattccttatcagcattttctaaccaataatcatgacttggataatcaaatctttggttaattcttccgattaccttaagataaatttccttcttatcttcaaaataggcatatacagagcctgttgctacattggcttcattagatatatctgctgttgtagtattataataacctttttcattgaataatttgtaagccgcttctaaaattctatcgtatttttctaatgctcttttttgtgttggtattcttgtctttctttccatctttatcacctatataaataataaaagataaaaaaataaaagtcaataaaatatgaaattcatttcatgtattgacttttatttttttccagcgtattatatgaatatgaacttagtttcatattctataatataattttttggaggatatcatgaataaaaaacaaaaagtattagcatttatttcactggcaatagcttgcttcttaacagtattagattcaaccatagttaatgtatctttaccttctatggctgattatttcaacacggatataacaggaatatcatgggtaagtaccgcgtacttaattccattctctgctcttttaataaatttttctaaaatcgcagatatttttgggcgaaagaaactatttataattggtcttatagtatttggtacctcatcaatactttgtgggctttccacttccctttccatgattataatttttagaataatgcaagggataggagctgcaattcttgctccattagccattcctttaggtatcgaattatttggtaaagatgctatgtcaaaacttgctattgcaattggtatgataatttctatagctgctgcttctggtcctgttgttggcggaatcttaaatgaagcctttggttttaaagcaatattctatgtaaatgttccttttataatcatctctttaatctttggagctcaatgtcttactgaatgctatgatagaacaattgaaaagcgaatagattttattggttccatattattagcttatggaatcggagcactaacctttttccttgttaaaggaagctcatatggctggggcagtacaaaaatagttactttaataataacttcagcaatttcaattattgctttcttaatatatgaattaagatcaaaaaatccaatgatagaatttaaattatttaaaataagaagctttacttcttcgataataatagttggagtaatattctttgcttatatgcctatatcttatttaatgaatttctatctagaaaaccaattaggttattctgttttaaaatctgggcttattttaggtatagtaagtggtgtttcatttctcacctctccaatctttggaattatatctaagaggtatggtgctagaattatttcgttattagccataatttttgtatctttaggtgatcttatgcttgtatttatgaataattcaaacaatatggagataatttatggcgcattcattgtagtaggacttggtgttgcttcaacctctccattatataaaagtgcatttgacgaggtttcaaaagataagaatggtattgcttcaggaatattgaacagcttcaggcaactaactgcatgtttagctatagccttagtttcaacattaagcagctattacactactcaagctatacataattcaaaaaacagaataatcgaacttgttaataacaatacagttcttgaagatcaagtgaaatctacgataattgataaaatacaaactgcagacaccagcaaaaatacttccttttcgaaagatatagttgataaattaattaaagacaaagaggatactgtgttagcttccaatcctgataaaatgaagccagctatagaagaaaactttaatactcaaacaaaagaaatccataagatcttagataacatgactgtcataaaaaatgatgaaagtaataaagtttataataagtgcttcctactcacagcagttatcgcaattttgggattagcggcagtaccttttaataaaatgaaagaaactgaacttggaaaaaccaaaccagaatttgtagtatgaatatttcaaaataaccattgaaatgacattaatatttttagtaaaataattcttatcatattataatatagaagtcttatttttcaatataatatttatttttcagcattctgttgataattatactgcttaattctaattacagtaaataagcccaagacagttccatatgccttgggcttattttttaccatagctattgacgcttagatatattactatctatagtcaagtcttcattctagctaaaatgatatgcactcatttgaattacttttatataataaatttattattcacttttcatctatcaaccatcaaatcgtaataaatataactttaatttataaatcgaaatatttactccataaatttcgattaaattgttgctccaaactgtgacgaatgagtaaatataaattccgctcctcccattcccatagcaaagaaaactaaaataataactaatattattgcgctaaaatcatattgcattttttcttgattatttattatataagctgcgataatctctattccaacacttactaaaataagtggccacattgatacaattaaaagaacattaagattagttataaacaatcttagtaaaaacattatcccaaatataactaaagcaagtcctgaagttaacgtgcctactctacgccccttaatcatctatctcactctccatttttttccctttgataagttttataccaagtgtaactattgctactcctatgattactttaggaatgtccctcattaaatcataaataataaaacggcgtagttcatatggaatatatggttctaaaatactcattatattttctataactaaatacacacctaaaaataagcatataacacctactgtaagtttacgtttctcaaatatatctttatctaattttgctagcttatcaatagaaaacaaatacttatcttctaaaagtaaaagttcgtcgtcatttaaattcattctattagtacaatcaaagaaagaatagaaccaaataagtggtgctacatataatagcggtcctatgttaagccatgaagaaagaaatattaaaaagaagaatgctgacataaaagatacccctattttcataaatcccatatacatatgtcctgcacctggtaacattgaaaaaacaaaagttaaaaatctactttttctcttgatcattattaaaaacctccagtttaattattttttcagaaaagttattaagatttacattaaccgaatctacaatcctagaatccaatggtctaacatgatttgtcgctgtattaaccaaagaatttaatccatttgaaaaaaccaatactaatgccacactagctgcaactgcaactttaacacaataaaaacggaactgaatcttgctttgcctcttactttttattttaatttgtactttttcttgaaaacctaaaggagcttctgcaagttcatcttctttaaaactatcagcaaattcaccagcacacatttgacaatcgctaatatgttctaatatatcaatcatttcttcgtcgcctaaaatatcaaatttaagcatgtttaatgtttcttccgtcaaatgaccttctttatcaaataatctattattcacatgaactcctccttccataaatcctttaacattttttttgacctgtaaagttgcgtttccaaagttttaatattctgcccagtttccttcgctaaatgtgatagtttgacatccttgcaaaaataatttgtagctacagtcctatatggctcttttagcttgctgcataaaatttgtattctctctgtcgtattctttttaactactgtttcttcaggtgaatctcctctatactcaagatcttgatattcatcttctgacaagctaactgtttttcttgccttactcttaagataatccttacatttatttgcagcaattctagcaagccaagccttaaggttatcaccatcaaagccttcccaattttgatatgctgataaaaatgtttgctgagccaaatcttcagcatcaaaataattttttgtgaaggataaacaaatagtgataattaacctttcatattgttttatgcaatttggaaattgttctttttcaatatctatcaccaccttaattagtccttacattaaatataacgatcaataaacaaaaaacacttcaactttttttaaaattatagaaaatttattaatttaaattaaatgtatttgttttcctactataaatagtcttattcttataaaacattttataagaataagaccattaaagttaaaatatcaccatttatttcagctagagccttagcatttattttttcagctaacaattttacaatagaaagtcctaatccagtacttcttgaatttcttgacttatcagctgtgtaaaatttatcgaataataagattatgctgtcatttgaaaaaagcatataacgtattgtaagttccacatgaataaattttttaatacaggacaacctaattacatgtgtatttcaaataatttactaactatggaggacaacaatgaagctttttaaaaatgcactatcccttataataatttccatattactcttgcataacattgaaatctctgcatacgctagcccaaatgttaattctcaaagtcaagttaagattgcagtattcctaagcaattttaattctccatttatttctagtttaaaaaaggatttagaagaagttgaaaaagaaaatgaaaatagagtccaatttacattctttgattcaaaaggtaatgaagctattcaaaatcaaaatattgactggtcatttaatcagaactttaatctttttgtggtagacttggttaactctagcacaaatttttcacaaaatgctcttagcaaaatattcagctgtaatattccgctaattgtaacactaattccaagtgacccactaataaattatattagaacttataatcgagctgttataattggtgcagacgatgcccaatctggttctattcaaggaaaaattcttattgacacatggaattctaataaagaaaccctagatagaaataaggataatgtaatgcagtatattatgttaaaagggcctattggcgatccgtcaacacctttaagaagtaagtattctattcaaacaattaatgatgctggtataaaaacaaaagagctcctatcgtctacatgtaattggaataaagattgtgcaagagacgatatacaatcttcacttctaaatctatatagtaaggtagaggttataattgctaataatgatgctatggctattggtgctattgaagcacttcaaaaatatggttttaataaaggcggcaattcaagatgcattccagttgttggcgtagacgcaataccagaatccagaaatttaatcgatcagggatttatgacaggtacagttattcaaaatactcgtgcttatgcagatgctatacattctgtaggatttaatttaatttctggtgctcaaccacttagtcatacaaactatgaatttgatggaactggtcctataatcaaattgccttttcacgaatatataaaaaaacaataaatttctatttttataaactttattctataaataattccttataagtcatataaacgtatatactatcataaaatttataattaacattttcctaaatgcaaataggagaacttcctcccattcaggtttagttctcctatttgctcataatatgtcatcatcatctaaattcctgcctgctcgtttctccaattgttttatggcgtttttgcccccattttttgcaatctctaacaactctgaaagacttgatgaaatatctctacttgcaaaaacttctaatagcattggcatattaactccagttattacctccatatcttccttttctaatgcaatcatactagcagcattaaatggacttcccccaaagagatcaaccatgactaaaattccttctgtacaatttaattcttgtataagtttattgtatttatctaataaattcccaattccctctcctggcttaaacgtaacacatccaatattcttttgttctccatagatcatttctgcagatttaactaactctttagataaatctccatgagttcctacaattattcctatcattaaaattaccccttttaaagttttttcggttaggctttctatattaatgatataatatgacattatgttgtcaagttatatattatatatttatatgtgagactaactatatgaagtcaatataagttaataaaaaaattatattttttagtcaataaaaaagtgcatgacaaataaagcaatcacattgcttggaaaattaagaaattaaatttgtgaaacaaatgaagtattgttttttaaaagataaaaaataacacgtattagtttttttgctacatggctcatagcaatatagtaataattgccttcactttgcttctttgcaagataatccccaaaagtggaatcacgcatagaaacagttctagatgctgttaatatagcccaacgtaagtaggtagaaccacgtttaaccataggtgtatgtgtagcattatattttccggattgatatgttgatggatcaagtcctgaaaaagctaaaagctttgctggatcagtgaatctatctatatctccaatttcagctagaattattgaggctagtgtataagagattccaggaatactcattaaaggagagtctatttctataacaacatcctttatttgcttatctaaagcatcaatttcagcttgaacagatcgaattaacctaataatttgctgaagttcaaaagataaagaacgtgtgctagttccgatagaattgctagctacttcctttatttcaatagcttttgctctactatatttgcctttagtggatttagccagaaggtttgtcaatttagttaaatgacaattggatatttccttcgggctcggtaactccgataggagagcataaacagagacttgatgaatagaccaaacatactttggtaattcgggaaaaattatatctataagtctagtaattgatagtttaagcctagatctataaccaattaagcgatatctatgtctagttagtgactttagctcttgaatttgatatgatacaggtgaataggattttgtatcatcagagaaaagcattttagcaataactagtgcatccgttttatcggttttagttttcctaagggtttgagccttacggaaaagatttgtagctaaaggattgagaatggataggtgaaagcctttagcatacaaatagttttggagattagtgctataatgacctgttgattcaagtcctatttttacgttagaaatatccttgttaggtatgacggaaagtattgaagaataaagtaattcaaaaccttcacgtgaattggatatacgtaaagaatcattaataataacaccatctgaatcaataatgcagcaatcgtgtttagctttagctacatcaatgccaatataaatcataagaacaactccttttttaatttagtccgctatgctccacgtagcttcatgctaaatgtatccttgctctatataaaacgtcatgcgttatctaactaattaacaaataagcataaagctgtggttatatcctcaattgaaatagtctagctataggtgaaaaaactaatcctcagcgtcttatgttaagtatagtaaaaattattaagaaaggaaaagtataatgaatttttactacatgttcattatacaaggtgatattatgcaaattagcagattgtttcaaattatatatattctactcaaaagaaaatccataacagctagggaactatcagagcatttcgaagtatctgtcagaacaatttatagagatattgatgctctatgccaagctggaattcctatatattcaagtcaaggtaaaggaggcggtatttcattagtcgataaattcatttttgatagatcactattttctgaagtagaacaggataaaattctacttgctctacaaagtctttccgctgtgggatacgatgatattaatgacgtattatcaaaattgagcaatctttttcaaaaaggtgatgttaattggattgaagttgatttctcaaactggggtagtgagaaaaaacaaaaaaagatctttaatctaataaaagaatcaatactaaagcaaaaagtaattaatttctcatattttagtgctggcggtatgaaaagtaataggtatgttgaaccttttaaattgttatttaaagataaatcctggtatctacacggatattgtctcaaaagaagatcgttcagaacctttaagataactcgtatgagtgatattaatattacagataaaagttgtacacatcaagatttacaagatcttattgatgattcaccatcagaaaaattcagtgaactaattcatcttaagctaaaagtatcatcagaaggtgcctatagagtatacgatgattttgatgaagaaaatataactatgaataaagatggctcttactctgtagacatttcgatgcctgaaggtgaatggatttataattatcttctttcattcgggacaatgttagaaattatagagccgacagatatccgaaacgaaattattaaccgtttaggcaacatgataaataaatatacttctaaaacttgacatgatgtagtcaagtttagtttattacaataataataaataaaatttaactgtataaggattacgtcattaaaatattttagtatattttaaattcaaattataataaaatatcaagttttttgatacagtagtcacaaggagattatgaaatacttatgagtgaaccattaaaaaatatttatacgttggaatttttaaatgattttgcaaataaaatacacaatgtttatacagaatttaataagaacgattttgttgcttcagttttagcttatccgtgggatgaattacctttaaaggctcgtattcatagaatagctgaaatattaggtaactaccttcctaatgattttgaaaatgcgctaaatatcttattctctattaatgaaagctgtgtgggattcccatatctattctttcctgattttgttgctacatatgggcgacacgaggaatattttgagctttccatgaatgctttagaacgcttcactcaacaatcatcgtcagagtttgcgattcgaccctttttattgagtgactctaacagtgtaatgaaatatatgatgaaatggtcattatctcccaatgagcatatacggcgtctttcaagtgaaggttgtcggccacgtctcccttggggaatagctcttccgatgtttaaagccgatccattacctgtttttaaagtgttagaaaatttgaaagaagacgactctctttatgtacgcaagagtgttgctaacaaccttaatgacatttcaaaagataaccctgacgctgttttagcgatagcggaaaattggatatgtcataatcaaaatactgattggattttaagacacggatgtcgcactcttattaaaagagctaatcccaatgcaatgtcactctttggttacactagctcttcagctgaaaatcccatatttagaaatgcctcaatctctgctcaacctaaccaccttaaaattggaggcagttgtgagttgaattattcactggatatagactggggttctccagtacatatccgcttggaatatggcattgattttataaaatcaaatggtaaaccatcacgtaaattattttttttatctgacaaaacattgttacctaatgcacatttacagggtacgcgtatacatagctttgcagatcttactgtccgcaagcattatcctggcattcataaaattgttcttatagttaacggcatagaagctacgcagactaccttagatattctcggagacaaatatgattataaataatctactatataaaataaaaaaacaggatatcaataatattaaacaaacaatgcaaatatattatcgcagcatatattgaatttaaataatatctatattaatatgaatatttctacgagactttcatataatatagatgttttcatgatttaaactatccactttttagcccccttgttggggcttttttgtttatatataaaattcttttctgtttttattaatttatataggtacttatatttagtataaactttttcttaaaacgtataataagcttataagtacagagaattggaggatttaaatgaagatattaaaaaaaatattagctgtaactgcacttactattatatttagtattgtacttaaaagcagtcttctagatactacagctgttgcagaaatttctaggcaaggagctcctattaaagtcggtctattttcagccgatcttaatgatgattaccttatctttcttcgtaaaaattttgaagatattcaaaatcagcatccaaatgaggtcatattcacattttatgatgctaaattcaatcaatcaactcaaaatacagaacttgattccaaacttaacgaaggaattgatcttatattactagatatggttaatgtcaacgatataggtgacttaattagtaaaatatcaaaatatgaaattccagtaatagttttcaatagagaaccacttacaatggatgctataaaatcatataaaaaggccttatatgtgggtacagattcaaaacaagctggcactttacaaggtaaaattattattgatgcttggaacaagcataaggatttaattgataaaaataaagataacgtactacaatacataatgcttattggtgaaagacttaacaaaacatctatcgatagatcagcatactctatttcaactatccagcaagctggaataaagactgaagagcttgcgtcacctgttttgagttgggatagagatacagctcaaaatactgttgatgcattatttttaagatttggaaacaaagtagaggcaataatttcaaatgatgattctatggcaattggtgcaactaacgcattacaaaaatatggctataatgctggaaataaatccaaagtgattcctattgttggagtggatggcgttcctgaagccaaagaattaatttcaaaaggcttcatgttaggttctcctgttcaagatactagtattatggctaatgctatttataccataggttctaatttagctcatggaataaatcctactgaaggaacaccatacaaattagatgaatctggggctgctgttcgtataccatacgaagaatataccggtccaatgtttcaataaaaaattaaatacttaaatagaattacattgaattttaagcaaatgttaatacttcaatgcaatttttaagtaaaaaggctatctgttaacaaatagcctttttactatgcaaaacttcttgcagacttataaacttaacattgtttaataaaattacatatttactataatgttatcttcttaatttaataatgtttctaaatatcctcttctttatcatattaactgctatttttaattcaatagagaattcacatcaatttattttattaactaataattattattgactaatataattattatgtatataataatgttaaagataaaactctcatttttttctaattatgttagataaattttaaacaatttgatggtttcaatcttaaaatatacataaataataattttaagattcttagtcattaaaaagacattttagaaataaatttaaagagtacaagattgttgcaatgacaattgaacttggttatttagcagaaagtaaaactttatatccaggatcttgcagaaaaattacgaagaaatagttaaagatttataattaaatttaggaggtaataaaatgactgaattaaaacaagtttataaatgtgaagtttgtggtaatattgtggaggttgttcataatgctggaggtacactagtatgttgtaatcagccaatgaagcttaaggctgaaaacactactgatggagcaacagaaaaacacgttcctgtaattgaaaaagttgaaggtggagttttagtaaaagtaggttctgtagaacatcctatgcttgataatcactatatagaatggatcgaaattcatactgaaaataacgtatataaaaaattcttaaaacctggtgagaagcctgaggctttctttaaggtagatgaacctgttctttttgctagagaatattgcaatttgcatggtttgtgggctgagaagaattcttaataaaaaactttttatttaaatgataactgtctgtactcatttgattattccttacatatcttaatcaaatggtacaggcttactgttttgcttgaaaaactgtcatttcaatattagcacctaaatccttctaagaaaataataatatactttcatataatacgaatcaggtacattcgctattttttttatatttttagttaatacataaaagcagtgtgaacttcaaattattgaaattcacactgtttttttagagcttgtctttatttaggaggcattattgttgctacgcctttaagcacttcaacaccatcttgatttgtacatgtagtacttaattttattctatttttatcttcaattctttctattacttccacttctgccttaattgtatctcctatttttactggagctgtaaattttagttcttgtccaagataaatggagcctggacctggcaattgcattcctaatactgcagatactaagccagcagttaacattccatgagcaattctaccttgaaacattgttttttctgattcaacttgatttatatgcgctggatttaaatctcctgttattccagcatataaatatacatcagtttctgtaattgtcttttgaaaagatgccttatctccaatctttaattcctttatagttaatcctttcactagtattccccctttttgctatataattttcaagtcttattaaataaaatgtaatatgctttgtaatgctattaatgcgaatacagttcctgtctttatgcaagtgattacgaatatatctttatatgattgtttatgagttaatcctgcaattccaagtaatgttataactgcgccattatgaggtaatgtatccattccacctgaagccatagcagcaacacggtgaagtaattgtggatctataccaacactatttgcccaagttaaatattgttttccaaatgtgtcaagtgctatactcattcctcctgaagcagaacctgtaactcctgaaagaacatttactgtaactgcctctgaaagtaatggacttccatctggattaatattagttaaagcatgagctatagattgaaatcctggtaaagttttaataacattcccaaagcctacttctgatgctgtgttcataactgctaaaagtgatccgattgcaccagcattaattgctgcagcaaagtttcctttcatacgttttgggttaattgatactgcaagagtaataccaattacaagtgcaatcataagagcccagttattcattgaacctacaacaccagcttctggtatattgtatggagctttagttacccaagaaacgatatcccatttaggaaatacaactttttgaagaactagagtcactataagtaccgatgctaatggtaatgctgatataaatggattaggtaagctactgtcttcaacaattacaggctcttgcttatggtttgttccatatccttctccttttgcctgagctttgcgcttacaccattctaagtaagataccccacaaactaaaaccataattgcacctagagttccaaatataggagctgcatatagatctgtgttaaaaaatttcattggtatagagttttgaatttgaggtgttcctggaagcgcatccattgtgaatgtaaaagcaccaacagcaatagttgcaggaacaagtctctttggtatatctgcttctttaaatatagaagctgcaaatggataaacagcaaatgctacaacgaaaagacttactccaccataagttagtatagctgctgctagtattacagatagcatagctcgttttttccctagcttatctactataaattttgctattgattttgctgcaccagattgctccataaccttaccaaatactgcacctagtaagaagaatggaaagtaaacttttacataattacccaaattaggtaagaatatttctgtataggttggcataatcgccattcctgaaaatatagctgccataatcgcaaatataggtgcgaaaacaataactgagaaccccttataggccataaacattaaaagtgctaagcttaataaaattcctataactgccatatacaaaacctccgttattttattatttttattttcaaatattttatccgtatcctattcacttatattagttgttacttcaacttcataggcttatctttaaaaattctttcatccattattttcaattcctttgatattattggcttaaagtccatttgatcaataatatccttttgcaagtctactcctggagctatttcttctaatgttactccatcttttgttaatctgaaaactgctctttcagttatatataatactggttggttcacatctctagcgtaatctccactgaatgtaatttgctcaacattttttataaacttctttgatcttccctcattttcgattactaacttaccatcagcaacattaattttaagtcctcctgctgtaaatgtgccacagaatataaccttttttgagttttgagttatatttataaatcctccacatccagctatcttaggaccaaatttacttacatttatattacctttttcatcgcattgagctagtcctaaaaacgctacatctaaccctccgccatcataaaaatcaaattgagatgactgatctataatgctatctggatttatagctgcaccaaaacttaaacctcctgctgggattccaccaattgggccagattcaatagttaatctcattgtatctcctattccttcttcattggcaaccattgaaattccctccggcatacctataccaagattagtcactgcatttggtatgagttccattgcacaacgccttgctattatttttctctcatccattgaaagacatttgatagaatctgctggcattcttatttctccactataagcaggattaaatgcttcagcaaatgtctgcatatggtcttcactattagctacaactattgcatctacaagtattccagggatttttacaagctttggatctaaagttcccttagagactattttctcaacctgaagaattacttttccaccagaattttttgctgcctgtgccatagataaaccatccagtgttgctgcttccttttgaagagttgcatttccatcttcatctgcatatgttgcccttaatatagatacatctataggaaatgctttgtagtagagatattccttattatcaatttcaataacctttacaatgtcctctgttgtacattcatttaattttcctccctcaactcttggatctacgaaagtctttaaaccaacatgagtaattgtacctggtttacctgccgcaatatctctataaagactagatattactccttgtggaagattgtaagcctttattttattttcaattgcgagtttttggatcttaggagctaatccccaatgtccacctattacctttgaaagaaggccttcttgtcctaaatgattcaaacctttttctttaccatctccttgtcccgctgcataaacaagagttaaattattaggggaaccttgttctaagtatatttccttaagtttcttagaaaccccttctgcatgcccagcacctataaatccaccaaatgcaactgtgtctccacttttgattaaggcgattgcttgttctaccgacattatcttgttcatctttactcctccttttcacacttttatatactccataaagcaagagtgtaatattttatttataattccttttacacttatttatataagcaatatccgtgccaagatttcgatcatgtattcaacgtaaaattgcgcttttctataagtaatttcataaaaaaatcttaatcatagaaagtttttgtacgttatttcgtacattttcttaagtaaacatttacatagtgtatgattttccgtacaattattttgcataaaaaaagtagttgttcgtaaaaacgaacaactatgtttgtattttatatttttctattttctcatataaactagtacgccctatatcaagaatttttgctgccttagttttattaccatccgcagccctaagggcaagaataatagcatttttttcactttcagcaagaatatcttgaagcttcttaggaaccattaaaacctttttccctgtgatctctttcggtaaatctttcacttgaataatatcactattctccataatgtttatagcccgctctaatatattttctaattctcttacattacccttccattcataaattttaagatattgttcagcctccttagaaattcctttaaccttcttatctaaatcaactgaaagctttcttattaaatgattagaaataagtattatatcatttcctctttctcttaaaggtggaatttcaattgtcacaacattaagtctataatataaatcttcacgaaacttaccttcttcaactaatctttcaagatttctatttgttgcagcaattattctaatattaatctttttactagctacgccaccaactttttcaacttctctttcttgaataactcttaatagctttacctgcatatggagaggcatatctccaatctcatctagaaatatagtaccttcatttgcaatttcgaattttcctatcttaccttcttttttggcacctgtaaatgctcctgcttcatagccaaataattctgattcaagtaaatcacttggaattgctgcacaattaaccttaacaaatggcccttcatgtctattactttctgaatgtattgcatgtgcaaaaatttctttacctgtcccgctttcccctaaaattagaacatttgaatttgtatgagctgctttttcaactatagctttagccataacaataggttcactctcacctataatattttcaagcgaataatttgctttattgaattctctaagctttgatttataagtagctaattccttttctataacacttattcgtttataaaggctatttaattcttttacatttctaaatagaaccttccccactaccccaataatttctccattttttactattggtattcttgacgctatcatgtagcttccctttatcttatgaagttgtgccacttcttcttttccagtttctaatactattggcattctagtattttctataacttcatttacatgcctgccaatagcatcctctctcttaattcctaaaaattctgtatatgcattactgatcatagtaactataccctgcttatcgatgataatcattccatcataagcagtttcaatcacagtatttagtatttctttgttatctctctcttcctcaagcttatgaattaactgattataatttgtcacattactaaaaatcagcattgatccctgtgtatcagtattttctccaaaaggtatgatactcaagatcaaattcagttcattaactactatcggccttttaatttcctcttttttagttgacagaaagtattctatatctgcctctggaattatttcgttaatattctttcctaaaccacctttactatctatgtcaaaaagaatactagctgcttcattaataaaaaatattttgttgttactatcaactgaaattattgcattaaacatattattaagtattacttcaagtttactaatataatttttgagtaatggtttgttgctcatgtaacaccttctctcataaatcttatttttaagtattttactaaagattccaagtaaacacaagggataaagtaactgctttggaacatggtattcagttctatattcccatttataagccttccacatatacttttaataaatacaaataaaacttttaaaaatatagacatccgcctttaaaactatatttatgtgttagcttactgaaatcataaatattttgattccgaaaaactatgaaagtttcgctaaaagtgctaaataaccacaatgcatatacacttaaattaaatataattttttatgagcatttagaagggactgataaaaataaaaagaataacttcatcttattattcctcaaatacagccaaatatagaatagtaggatatatacacggtgccaccactaatgtaaatcctaacaaattaactcatattaattacgcttttggaagtattataaacagttcaatttttattcctgatgatcaaaatttaatgaatttagtatcattaaaatctcaaaatccaaaattaatggttatcctttcaataggtggctggggagctgaaggtttttccgatgcagcctatttagagtcatcacgtaatagttttgcaaatagctgtctggatatcgtaaataactatggtatagatggaatagaccttgattgggaatatcctgttagcggctcttgtaacctaattaaatgtactcctaaagataaagaaaatttcacgcttttacttaaatctatacgtaacaaaattggaacgaataaaatactcagtattgcagctggagcagataaattttacattaataacgtagaaattaatgaaatagtaaatatctgtgattatataaatttaatgacttatgactttggttataatactcataatgcaaatctttatccaacttcttccccctatggatcaggttttagctgtgatgactcagtaaacatatttttgcaggcaggtgttccagctatgaaaattaatttaggcattcctttttatgggtatcatggtcacgaatatctttcatatggaaatctacttgaaaattatataaataaaaatggttggactagatactgggattatgaagcaaaagctgcttatttaaaaaatgatgattcatttattacttatgaggatgaagaatcaattgagtataaaattaagtatataaaatcaaaaggtcttggcggcgcaatgttctgggaatataatcaagattacaatggtattcttctaaataaattatggacaggtttaaacgaataatcttatatagaacaaaatcgcaggcgaataagatttctttcttattctttttaaaatacagaaactaatcaatcaaccttttttaagttatccatagattttattggaatataaattcctaaaaaataaaaaataaagataggatgtaacttaattcatcctattcttataaatatatatcttttaaaataccatcttattaaatttagttcttaatcttttttaaaataccaaattacgaatctttcgctcgtgaacttaaaactactaaaacataaattatcttaaaataatgtttttaagcaattagaaatcaaaattatccggatcaggtcctaccctaaaatcttcatttaatgaatttattttctctacttcttcgtcagtcaaatcaaaatcgaatatttgtgaattttctattattctgctttcatttatagacttaggaatagtcacaacatcattttgaatatcccaacgtaatattacttgtgcaacagatttattatggcttttagcaatctcttttaatacttcattatcaaataacttgccaaccataagtggtgaccacgcttcaacttgaatattattttgtttacaaaactctctcaccttcatttgtgttaagcgaggatgaaattctatttgatttaccatcgggttaatttctgaatccttcattaaatcctcaagatggcttacttgaaaattacttactcctatagacttcacttttccttgtttatataagtattctaaagctctccaagcatccttatactttcctgctacaggccaatgtataagatataaatctaagtaatcaagtccaagcctatttaaactttcatcatacgcctttattgcagactcatatcctaaatcagcgttccaaaccttagatgttataaataaatcttctctggaaataccagcttcttttatcccttcgacaattccttttcccatactcacttcattaccataaacagctgcaccatcaatacttctataaccatgctttatcgcagcccttactgcattagctaattctggagtatcctctgctctaaaaacaccaagacctaataatggcattttcacaccattacttaaagttactgttttatcaaacttacttaccatactctctttctccttataaattattaatttagtcattatcattttgaacactatcttataaagttagtaaatactttctcttcacctttactttcttctacattagctttcccagaatcagcaagttttaataaccatgccatgttctttcctaaaactctcattatctgcattccttcttcatcctgcactgcttctcccggtgctgtaccgtgaactacgttccaatagtttgatgttggcattaacatctcagaataattaagataattatttaactgagtaaaggttggaactccaccagaccttctaactgcaacaacacttgcgcctactttgtgtctaagcataccattatttacagatgtaacataaaacgcacgatctaaaaatgatttcatagttcctgctatggcagaataatgcactggagagcctagaatgattccatcagcttctttcatcttttgaatccaatcgttaacttcatcattctgcataacacacttttcgttcatatttctggcacatccgccacaagccatacatccacgtataaccttatttccaacatgaactatttctacatctatattctctttctttaattcttctgctacagcttttattgcctcgtaagtatttccattctttttgggacttccattaaaagcaactactttcataatacatacctccataatattaaaatcatgatgtgattatataactcagtaatgtaagtaacaagtacgcactttttagttagacaacttactttttggtaagaattattgaataacctacatgtaaggccataataaatttttcataaaacaataatattcttattataattcgcaatatataactttttctaatagccatggtaaaataaccattatcctatacaatcttctaaattattactaacgtacattttccattttagttaattgatttgatattattagacaggttgtttatactaatatctagtgacacttgttaaatattaaagaacgaaagcgggtaactaaatggtaaattataacggaagaagttatgtgtgcttattagattttgcaatggattttataagaggaaaatggaaggcagttttattatgtcatttatataatgaaccaaaaagattcctagaacttcaacgaatgactgaaggaataagtcaaaaagtgttaaatgaaaaacttaaagaattagaaaatgatgaacttgtatgtaaaaaggtttatgcagaaattccacccaaagttgaatactcccttactgataaaggaaaagaacttactagtattattaaggaaattgagtcttggtcggttaaacactaccctgaattagataataaatgtgtttaattctattacttttttataattgaaataaagaagaaccttatcctttagagatgattcttctttatctttttcacattatttattgacttaataattcccatacatatggcaacaaacctatacagtctcattgcttggtaacatctcattacacaagtaatgattactccatttctttaagcttcaaactgtattagtgaaaaaaactatttgatagtaatcctaataattagcttctcacattcatgtacatatagcaggatgagtgtagattcatttatttcaaaattaatacttttatcttaaatttctcctatttagtgccaagcctagtttcattagtttctatactgtattctaaatccgcataagcttttatcgaaaaaccgtctaccttgcctgtgtatggattaatatatatctctacttttttagaagaatcattttcatcttgataaaaaagacgatgtccattttcgcctgctacaagtatacatttaggtttttctatatcccctagcttatgctgcttaataaaatcttcagctgtatcttttaattgttcttgagaaattgttaacttaggtttggattcatcaagatatccttcactaatcaatacataatctatttcctttgtattttcattaaaatcaaacatatagcatttatcttcattaattccaacccatcctgcttgaaccattccatgctttaattttgctaccctatccttaagtccattatcattttcttcaacaaaagccatttccttatcatattcttccttagatatttctttcttatcatatgaatcttgtatatcttttttttctagtggctttattgcatccaaagttttttcatttaatatatctgcactaaacttaaaatcttcattttcttcaactgatgatatgttaaaatactcttttaaaatatctaaagatttctgcctataagcttccttctcatcaccaattactaggcctgttccatcatctttagatactggtgaagcatcatctttagtgtaaacaacattttgttttatagtatctgcaaaagctcctttcatattaatttgattaaatatagcaaaagtagatgctcctactcctactgttaacaatactgccactatttttttagaatgcataataacccctccataatatattttttaattgtgcgtaagtacttactccactctctaagtataggatttaaatgtcccaaaagtttattatagttgtgaaatagttgtaaacttacatatatttcactaacaaactcaatcaaaaattcagaactctctatttctatttacgataatttttcttcaaactatctaaaactaattttctaaaatatacacgtaagttaagttcatactttttaattcacaagcgtatcatttatttcagtaacaggattattaaaaattaaaataacttctgttcctatacctaaatcactatttattttaatatctgcattgtgaacctctgctatctttttacatatagaaagacctattcccgctccattattttttctacttctagctttatcaactacataaaatggctgccaaagtttatctaaatgttctttagctattcccaaacctgaatctactacagataggtaagttttattctgaaaaatgtatatttttatatatatttttgaatcattttcagatgcttttatagcattttcaactagattagataatgccatagtaattagatccttgtctatatctagtacgcaatcctctccttcaataattaagtctatatttttatctttaagtttactagataacaatcttctaacctcgtttattatagtaaatattttttcaggcattaactcgatttcttgagtctttgtataaatcaaatccatcattttaaaagccatcttttcaagcctttttccttctttatatatgtaatccgaagcttcaacaaatacctcttcattatattttgatgttctaattaaatttgcatatccaattattgaagttaaaggtgtcttaagttcatgagtcagattatttataaaggtttccttctcaatattagatgtttcaagttcgtttattttttcttctattgtctgcgccataagattaaaattatttgatagcacgctaaattcatctcttgatttaatttttgccctttctgaatacttgccaagagatattttctgggtcgaagctattaatgtatttattggttttgttattaatttgcttataaaaaacataaatatagcaaaaagagaacagattaaaatatctaatttcataaaaagagcatattgatttattttttcagaatatatatttgaaatgtctttcgcatagtgtacttttattggatagtcatatacattaactaaactactagcgtacaaatactgtttaccatctactgtcctaataatatagttggtttttcctggcaaaaggtcttctagttcatccttttcgtttgaaaatggaaatttcatgtctgaaaataatatattattcctagaatctaaaatttctacgtctccatgctgttctgctccactattagcagccttattatattcatccattaaagtaccaattaatatatttatatcataggtattacttgaatatattttctgcatatacatagaattaacgcttaattgtgaagacgcaaatttttgttctgcgaggcacttatcaacttctttttctagcagatcattatgaagtttttgtatcaatataaatccagctatatttaaagtgaatacaagtaatagtaacgaaaaaagatatattttaagccataacttcatgtatttcactcctctaatctatatccaattttatatacagtttttatgttatccgcaatatcaagcttttttcttattttttgtatatgagtatctattgttctagtctcccccatatactcatatccccaaattttttctaataaatactccctggataatgccatatttttatttttcacgagcaaaagtatgagctcaaattcttttaacgtaagctcaattgtctcatctccattttttataatcctttcatcttcatatatttttaaatttttaaattctatgcaattattatttttagagtatcttcttaatactatttcaattcttgctagtaattcaactgtttcaaatggtttaacaatataatcttctgcaccagattttaagccagttattttatcagcaagtccatttttggcagtcagaaatattactggtatatttaaacctcttatcctcttcattaattcaaaaccatctatacctggcagcataatatccatgagtataagatcaaaagactcttgtttaattaaatctaaagcctccattccatcaaatacctgcttgcattggtagccagccattcctaggcttatccgtattaaattagatatagcttcatcgtcttctacaattaaaatatttatcttcaattatgtatttccccctaataactaacttgatattttaaagtaaattcttcaatttaactttcatctccattatataacataacttccaatgaaattgcaaaatagttgtaaaataaattttgacctaactgcatatatgagctcaagatagctaaatcatgcttacttcataataggcctaagcccttacacttttcacaatttttaaaatatttaaatcaacttattttatcccttaaatttttatgatatattttagcactaaaaaatacttagagttcgtatttctctaagtattttctatttatatatattattctaatacgatgtttgctttattaggctgtacttttacagttcttaatagaattctctttttgatatatttatattaaagagattaattaaaatcccctccttttttatatatttaagattgtatattgtttacagctatttatattatatctacttatatagattatttactagcagttgctccacttgagacagttatatctgtattctttccaataccatttatattatcattagttgtagaattagttgcagcttctttaccatttgcatcctttgacactataattgctggagcagtgaaatcatacatcttatctccaatgtcaatttttttatctatcatttttccacttccatcaaaataataccaaaaaccattattctttatccaacaatttgatgccatcattccatttgtccagaaataataccaatttccattatccatcatccattgggttaccattactccatcttttccgaagttataccaatctccattgatttgtttccatcctttggcctttacaccattctcaacccaactatagtttttatacttatcctgtttccatactgctgaagctgctgttggcattacccctattactgatacaactagcagtgatgataaaattaacttctttatcatttcaatcttcctctctttgattaatttaataacattattataactataataatattacaatttattctaatcttttgcaaactaaatactatttacctttgttaatgttggaaattactatatattaaagtatattattgacataaaccctatttacctattatataaaaaaattttttctactattgacggcttgtaccatgtcgtagtaaaattaatgcggaaaacaaaagctaaataaaaactttgttaggtgaggctcctatatagatacatgctgctgcccggaaacgtcgagagacgccaatgggtcaacaggtattgccggattaaggttctacttaatgtagccgaaaaccatatggttttctatgctctatagtgctaaaactcaacgagtgaaggttaatacaacaaatgtactttgcgctatcgcattctgtatatttgtataatgttgtgtttgattgttgcgcccttcacttatagtgaagggcttttattattttttaaagggggtgtatccagtggatgaccatgatacggaaagttgtaatatacatttttatttaaattcaagcaataatatttttagggcattaattggatactctctttgtgccctgaattgaaagggtgaaaaacatggaaaaaataacaaatttctttgtaagtaaaattattcataaagaaattcacaatatttctggccaaataattggtaaactaaacgaccttattcttgattttagccaagaaaaaccaactgtagtatatatacaaattacaaattggaaaaaatctttttatctatctgctgatgcgctagatatattcaaagatgaaaaagaaaagtatcatattaaaattaatagcgagagcctcacaataaagtttcctggtgaagatgatatttttttagtaagagatttcctagataaacaaatagtagacataaacggcaagaaagtagaacgtgtcaatgatgtaagactcggaaatataaattccaaatggcagcttgttgccgttgatataggaactagaggattactcagacgtcttggtgtagaatatcctttcataatattaacagaagccttaagatatagattaagaaacaagttaattatatgggatgatgtgcaaactttgtctactggagtgaacaatttacaacttcaaatgccagcaagcaaaattgaaactctgcacgcagcagatttagcagatataatcgaagatcttgatactaaaagcagagatatattatttcacagcttaaacaatcaaaaagctgctgaagttctcgaggaaatcgaaactgatgttcaagtaaatttattgaaatctatgtctgatgaaaaggcttctgatatacttgagattatgccttctgatgaaatagctgatattttagaagaaatggatgaagatagagttgaaaaactattaacacacatggatgaagaaagtcaggacgaaattagagaacttatggaatatgaaaaagaaactgtaggaagtattatgtcaaaagattttctaactttcttacctgatgtaactgtaagtgatgtatttagatggattcaaagcaatgctcctgacgaagatgaaagttattatatctatataacaaatgacaaagataatcttattggggttatttctttattctcacttattacttcaaagccagatacaaaactttataatataatgacaactaggccagaaagtttaagggatacggatgaaattgaagatgctataagcttaatgcataagtataatcttgtttcaattcctattattgatgaagataataatttagttggtgtagtatcattaaatgacagtatccatgaacattcacgcttaaggagggttgcactatgaagaaagtattatctggtagatttaaaaagctacttttcattatgactattattggcccaggattaattactgttaatgcaggaaatgatgctggtgggattacaacttatgcatctgttggtgcatcctatggatataaaatgctatggggattactcttaatcactttcagtcttgcagttatacaggaaatgaatgcaaggatggcagtagtaactggtaaaggtttgtctgacttaattagagaaaaattcggagttaaacttactttctttgcaatgaccattttactaattgccaatatgggtgttgtttttggtgattttgcaggaattgcagcaagcttagaattatttgatgtaagtaaatatatatctatccctattgtttctgtaataatctggttacttgttacaaaaggttcatataaaaaagtagaaaatatcttcctattgtttactcttgtattttttacttatattatatcagcgtttttaactaaacccgattggggacacgtaatgaaatcaatgatgacgcctaccattgaattaaatacaggttttcttcttacctttataggaatgattggtacaacaattaccccttacatgcagttttacctccaatcatccatagtagataaaaaaatcagtatatctgagtataaatacgaaaaacttgatgtttatttaggcgctttctgggggaatgcagtagcatttttcataattgtatgtacagccgtaacactttataaagctggaataacaataactagtgcagaagaggctgcaatttctctaaagccacttgctggtgaagctgcatttatactttttggtgctggactctttggagcttcagttcttgctactgctgttatcccattatctacttcctatgctatatgtgaagcctttggatgggaaagcggagttgataatgattataaggatgcaccagcattctttggaatatatactggtataattgttcttggagcattatttatacttcttcctggaatatcgcttattcaaattatacttgtatcacagcaaattgctggtttgctatctcctataatattaacatttatgataattttaattaatgataagcgtataatgggtgaatatgttaataataagactcaaaatattgtttcttgggctacagttatatttattataatcttatcaataatcttatttatatcgccacttatttcataattatatgaaacttcacaaattcttatgaaataaaatatatattataatctgtgttatttatagatctttataaataaaatagaacaaggtatgctttaaataacataccttgttctattttattaatcaccataagtattactcatcttcttctgcctacttagctttatttattcgaaataatatatatttttaaattttaattcattaagactcgtctaaactataagggaatgtaagttatatgcttttataactagtacattatatagaatttatatattaataccactaaaataaaacacatagtctatgtcttttaactataaaagttaaatctactttttctcatcccaacatttaatacaattcctagcgacataaaatttacaagtatagaacttccgccataactcataaacggaagagtaattcctgcaactggcataagaccaatagtcataccaatattttgaaagattgaaaataaaaagccagatgcagttccaacacagataagacgtccaataatgtcttttgattcctttgcatgcttaatcattttatatatcataatgctatataaagctatgagaaaaagagcgcccagaaagccccattcttctccaactgcagaaaatataaaatctgtgtgaacctcaggaatgaaaccaccagatgcacgagctccttttaaaaatccagatccaattaatccaccagctccaatgcctgttatggactgcattaattgaaaaccagcgttttgctgatatgattctggatccaagaatactaatattctctgcctttgatatggctttagtatatcactaaaccatatgataagacttagtggaacaactgagaaaaatcctacgataagaacctttaagtttaatccagaaatgaagtatattcctagcgtaataaaaaaacaaataagagtcattcctaaattaggctgaattacaattagaaacatcggaattaaggcatagaaagataagataagaaaattttttggattgttaatatcaccatctagatcatctaacttttttgcaaggattagtattaatccaaactttacaaactcaccaggctctatagctctatttccaatccttatccatgatgatgcaccttttactgctttgcttgttatatcattaaataataaaagtcctactcctgcccagtaaattagttttgcataaccacctatagtattataatcaaatactaaaataaaatatacaattgctagtccaataattagccacaatatttgcagttcagcataatagaatccaaactttatatgagttacactataaatgtttatgattccaaaaatcgtaataaaaatagctgttacaaacatagtaatatctaattgttttagaagcttattattaatcaaatatttattcatgtaaaatttcctcctgaaaagtcgaaacaattagtttatatgataattatgtattaataaattgtaatattcaaccacttatgccaaatcttaattttaatttaatacttaatttttcaatatataatcaaattttcacctagattttcacatttaaatttccaatcactatatattgctaaactcatagatactctaagtatactaacactaatatatatacacctgattttttgtaacatacctactttcgttattccctattaaattttacatctaatagttttaaaattatggaacaaaatagttgttaaaatattataataaataagacatagctattcctattatacttttatttatactcccttttattcgaaaaaaactctagtagtactgctagagttttttatttaaacaaaaaatttctactataagtattattatagtagaaattttaaatgctcattttagttattttttaaaaaatcttttctttctggcgtaaatacatcataaacaatagaattatcttctagtacaatgcacccatggggaatattagatgtcatgaagattgtatccccttctctaacaatttcgcttttatcaccaactataaatttaaaagaaccttttaacacatatgataactgatcatgtacatgagaatgagtctctacattattagttgcttttttaaaatgcacttctacagccatcatcttttcatcatgtactaatacctttcttttagtattttcatctagaatctcaaattcaacatctttattaaaacaaaacattttacatatcctctcttgcgttatagataaatcccatttaattatcatgcagtcatattatttcaattagcaaagcaatgagtttgtttgtttacattcttaaaatagttgaacattttgcaaaacatactcattatttttaatatattactcacatataaattacagaaatatatttataatctgctaagctaatatattttttatatattctttgatcttgtcacatttacagttatcaaagaaatattctttaaaattagctccacttacagcaccttttaataaatcttgatctatattctttaagattgttaacatatctgtatgtgttacctttttaacttcatctagtatttttttatttctttgttctggtactactctatcctttggatatccttgaccactttcaccttcaaataatttttcaaagatgtattctaaatttaattcagctccccatccaaagccttttgcaaatggaagtgaaattgcatttccatcatttatttgtgaaaacatatatgcatcagatggatctactatgtggccgcataagacgcctgggaatgcgttacatgcaagcatcgcaccttctccagttccgcatcctgtaattacataatctgctgcccctgagtttaataatattgcagctaaaataccattttgaacataagttaattgtgcttcaccttctatgccatacattccataattaaatacttcatgaccttttggctctacaacttttttaagcgactcacatataattgaattttttgatgcttggctgttttcatttattaatgctattttcatactatcgttcctctcctattgtggttgctttcctatataagctaagataccaccatctacatataaaatgtgaccattaacaaagtctgatgcatcagatgctaagaatacagctggtcctgccaaatcttctgctgttccccaacgtgctgctggtgtctttgcaattataaattgatcaaatgggtgttttgaaccatctggttgaacttctctaagtggtgctgtttgtggtgtagctatatatccaggccctataccattacattggatattgtattcaccatactcagaagcaatgttctttgttaacatctttaatccaccttttgctgctgcatatgctgaaactgtctctctacctaactcactcatcattgaacaaatgtttattatctttccatgaccctttttaatcattcctggtattactgctttagatacaataaatggtgcatttaaatctacatcaataaccttacggaagtcttcagctttcatttcaagcattggaatacgtctgattatacctgcattatttacaagaatatcaattactcctacttctttttcaattttttcaactaattcatttaccttatcttcatcagttacatcacaaacataaccgtgggcttctattcctaattctgtgtaagctgctagtcctttatctactaattcttgattaatatcgttaaatacaatagtagctcctgcttcagcataagactttgcgatactaaatcctataccataagaagcacctgttactaatgcaatttttccctttaatgaaaatccgtccataattcccataattaaaatcctcctctatgtgttacattttatatttacagtatatcactacatataatcaatttcttgttatatcctttcgaaaatattgcaaatcttgaaccatagatttataatggatgcattagataactcattatatattaagcaatgatcctttttaaagtaaacgtacaccaaaaatgaaaggagaagttttatttatgaaagaagaaaattcttgtaaagcttccataaagaactgcttagagcaacgctatttctctattgcacgcctatataaggaagaaaaaactatggacatacatatacatgactgttatgaaatatattactctatatccggcggaaaacaaatacttattcataataagctatatgatatcagccctggagatctatttgtaattaaccaatatgaaagtcatcacgtttccaaggttgatagggctcatgaacgaattgttatatcaattcatccagaatttcttaaatctatatcaagtgataaaacagatttaagttattgtttcacaaatcgtagtgaaaattttaatcataaaatctctttaaataaagaacagcaacagcattttctttattttatcaataaaataatagctactaatggatatggctctgacataattgagtatgcatcttttttagaactaattactttattaaatggtatttatattgcaaataataacttacatattgatgatcactcttataaatacaatcaacaagtccaagaaattataacatatataaatgaaaatattactgaacctattaccattgattatttagcgaatcatttttatttaagtccgtcttatatatgtagaatatttaaatcagccactggaactactataaataaatatatttcagcacgaagaataaccatagctaagtcattgttagctaatggtacaaatgttaatgaggtttgtgagaaatgtggttttaatgattatactaattttctaaaaacctttaaaaatgcagttggaatttctcctaaaaaatattcaacctttagcataagttaactcttaaaatttttgtataactaccttaaaccgataatatatttattagtaacattatctagttaactaaagtgaaatctttagtagaaattaagtttttgaatttatatgaagcagaatatgaaaataaaattgtgcattttaaaattttgattagtttaacaattttaaaggagatatgattatgttactgataaaaggttctactggttcttacgttacttatctgcaatatgccttaaaaatcaaatgttgctattttgatatagttaatggcgaattttcaactacaacatataatgcagtgataaaataccaaaattcaaaaggattaactgctaatggtgtaattgatgatactacttggaatgttttaaaaatagatatccaattaattcagcagcaacttactaacaaaggctatgtcttaactgtcgatggtattgccggcattaatacttataatacagtagtaaaatttcaaagagaaaacggtcttgcacctgatggaatggttggccctagtacattagcagctttggttacccaaacaccaagtccacagccttcttcaacatctgaacaaattgtttcaataaatcaacttaatgaagtgggttggaagaatgtatcccttaaccaaatcaacgagctaaatagctgcttaaaaacatttgctataataacctttccaaggctaaggcattttataagccaatgcagttatgaatctgaatgtggactttacactaaagaagtggattctggttataaatacgaaggtcgtgaagatttaggaaacatatatcctggagatggtccaaaatttaaaggtgctggttatatacaaataactggtcgaagtaactatcaaagcttttcaaattatatgcgtgatagaaacattatggacggagttaactacgtagcagctaattatccttggatgagcgctggtttctggtggtatactaataatatgaattcactttgcgatagcagatcttctgttgaaactataacaagagctgttaatggtggattaaatggccttagtggcaggcaaaaatattatgatatttgtcttagagtttttaggagtgatgtctactaatttatatcttttttattacataataaggatatgcctcaaaataaatgttccaaagcatatccttattgctaaactaccattctctgcccttatcaccagacatattatttttagttccactaggatataatactgaataatggtccaatttaggatcatttccagaatccttaaaaacaaataaaatcttaaactcgcttccagatttatagcctataatcttttctccatttgatgtaacatcatggtctggctgcccaaaaaagtctttaacatctgaaagtgaaatttgttttagctgactgtcaaatgatctaacttcaaaaacttgatcacctttattagtaccaaatacaacattcttacttgaataagtagcataatttccttttgcttctcctacccaatctgatttatctgcttttccccactttttttctatatcctgtagagttgaagtttttacagggaaatcacagttaataatctttccctcttcagataatttcttaatattatcaagaactgctttctgtgcattattttcagtgtttgacgtcccagcattactattttctgaaggagcatctgactttgaatttttgtcttcactggtttcactagtttcactgctgcttttgccatcatttgctgcatcacctgaaggcttacttgaattcgagcatcctgccattatggttataaacaatgtcataacaattatcaatattgatcttttattaaaaaataaactcatatcatttctttaggcatagcactgaatttataaattccttagcctaaatactcacttcctttccttttatataaatgttttaacgtagatttactaaaataccacaattatataatacccataattgatattattactcattaaaaaatatggttactatactctaattttatcacttttatcatttaaataggagactattaataaataaacttactaataacccgcattcagcacatgtattaatggaaaatattgtttctaaacataaaagttaaagaatgatattattattttatccaatattgaaagggtgttgaaattggatattaatgatatgcagatattttccgaagggcacctgcctatcgtgtcgggtgtttatgatcaattaaaaattggtaagaaaatagatgaggtagtaagctgggataaagaaaaatgtaaattgtcgccaggtgaagcagtaaaagctttaattcttaatattttaagtggttatgatccattgtacatgatatcagaattttataaagataaagatgtagaaaaactcgtaggcgaaagcattaattacactgaaattaacgaatttgccataggaagaaacttagacaaaatctatgattcagatgctaaaaaagtatattcgcatgtagtcttaacagcattaaaactagaaaacatagacgttaaagctatccactgggatacaacatctaaaagtttttcaggtgattacgaacgcgtaattccagaagtacaggatgataaaaaatatccaattaatattacatttgggcatagcaaagattacagaagagatttaaaacaaatgaagtttggagttggaactaccaaagataaacttccattattctgtgatgtgttaagcggaaatgaagatgataaaaagtggaatggcaatgtaattaaaagaattgaggaagaactttcaagtgttgatttatctaatattcttcacgttgccgatagtgcattagttaccaccgataatcttaaagaaattaatgatgagacatacaagtttatctcaagattaccgggtactttcagtctcgaagcgaagcttataaaaaaagctataaggacccctgaaaagtgggaagacttatctactttaggtaagaataaaaaaagagcaagcaaatatagaatacaaagttttaaggatgttattggtgaaaagaaatatcgttttgttgtatgtcattcatctaacctggctgaacaaaatatgaaaactttggaacgcaatatagaaaaagaaaagagtgaaacaaagaaagcatttgataaagctatttcaagagatggttatttctgcgaggcggatgcacagaaagccattcttaaatttgaagataaactaaaactcaagtaccataccctaaaatacacaatgcaggagaatgaacaaataaagaagcgatctggagtaaaaggacgaagaaaaaaagatgaaattccagaaacagaaaaagtatatatttttcagtacgaattaattgaagataaagataagataaatcaacgtaaagaagaaattgggatgtttgttcttataactaatgagttaaatgaggaaaacttaagtaacaaagaattgcttatggaatataaagatcaaaactctgttgaatcaacatttaagatattaaaatcaccaagttatgtagatgctatatttttaaataagccagaaagaatagaagctttcggctatgttatggttctagcagtattgctaatgaacttaatagaaaggcgaatttgtgaaaaattaaaactagagtctgaagaaataaatcttcttggtagaagaaaaacattttcgcctacggcaacggcattattcaaagtttttgaaaaagttaaagttgtagcaattcctttaggagcaggaattcaaagaattattcccggaggattagataaaaatcaaaaacggattttaaaattatgcggactaggtgaagaaatatatctagaaatcttttccaaaaacaaagatgtataatgggtaagggcattttgccctttgactgtaaaaattttaaagttataaaaatagatgacaatatttagaatacttgtccaatatttttggaaatatattcactaaaattgaattagcacatcataaatgctcaaatggaaagtttggcaatttatgatatgctgaatgcgggttatcacttttatcatttaaataggagactattaataaataaacttactaataaacttacttctataataaaatcttggggacttatgagtttcgttactataactttttccttttaagaataatttataatcaatagatggtattaaaattaaagcttagatttttgttttatactaaaaatctaagccttgattaaatagaattacatcattaataattttcttaaaacttcataaaatataattgaattttcttatgtatttaatttctttaattcttttatacattcttcgcagatagcaacttctttaaatttggtaacactttttatattgccacaaaaaatacatccaggagcatatttttttaatattattttcttttcttcttcaaaaatctccaaagagtccttttcattaattgaaagtaattgccttgtttcctttggaattactactcttccgagttcatcgactttccttaccattcctgttgctctcattatcaacattcccccttaacatattataattctactataatatatttcggaaattatttacagtctcattttttcaaattatggcaaattaataccattatttagctttaaattcttattatcagcgttattgatagatttaaaatatttttacatttttcaaaaaattctatattttaaatagaataatataataaactatcatgatagtcatcccaagtggaatccctagcttcatccattccttgctgttaatttttaatttaccggccgaaatgatattaggaatattccctggaatcatcattcctccactaataagtaatcccattaacaccgctttaatttgtacctcagacattttcacacttacttcagctgctgctagtgttgcgttatcaagaacagctgatgacatattaaaccaatacaaatagccagtatgaagatttattacataagtatcaattaatatcttaaatccctctccaagtaattctagagctataataaataaaataattttaagtgctcttataaatatttccttgttagtttcttctatagtaatttcttctgtattatttaattctattttttcttgaataccgtaaaatgtaccaataattccaagaataaatatagcaggtattatataaattccgtacttatccaagaggtaccaaaaacccacattaagttttgaaacaatcattgtagacaatggctctcctataggtgttaatacagctccgattccaattgaaaaacatgcaaccacatcaatattaattttattttttcggcttatcggtagtatgctaactatttctactaaaagcaaagctgcgataatagcagttattatgcttgacagaaatccaataataactattaacaaaaatataaaaagttttaatggtacgtatttaagaatatacgtaagtgcttcttttatatgagttgatagagccttaaatataaatccaccaattagtactgcaacagctattgtatacataaatttattttgaataattcctagaaataattctttatttatagctcctgatgaaacacatgctaacactcctactacaaatagaaatatttcaagattattttcaactttctttgatactattggtaatacaaatgtcactatcaataataatattaatacataaaacaaattataacactgcccttccgttataaaatgaacttgattgctgcttaattcctgttagatttttaccatagttaataaatttacaaatgatattaagttaatcttaccattttaatttagtactttagctagatatagtgatataaaaaaagcaggaaactcaaataagagtttcccaccctggaaacaaacttcttggaatcaagtacaaacttgtccaaccgataaaaaaatattctattaaatcttccaaaattatagcatatattttataaaacttcaaatgaaatatataatcctaatttattcacaaaaatataaaaatcatgctttacagtgctgcataagtgatttttaatgacttaatattttcaccaattgcatttaaaaagcgtggatttaataaaaaatctacggtaattttctataaataaatatctgaaaattctacatgtgtagtttgtattagacgatttcctgagaactctaccacttctctttcacctttctcttgaactatgctttcactaggaagaaatattgagaaagtacttcctcttccaaccttacttttaagagatatagttccgccaattgcttcaacaaatttcttcactaaagataaacctattccagttccttctgcttgtcttgataaagaactatcaacttgaccaaacctttcaaaaattatatcagctttatcctgaggtattcctatacctttatctttaacttcaatgcaaattccatctcttcttgagagaatttttacactaattgattttccttctggagtaaatttaatggcatttgataagagattcagcagtattctttcatacttttcatcatctattccaacaatcttttgtttaacggatgatgaaaatattatatcaatactcttttgactagcataagtatgtaccgaatcagcaatagccttagtcataaatactatatctatgttacttttattaacttttattcttcctgcattagctctagtaatatctaatatattatttaccagtcttaactgcctaaaggaatttagttttatcatccctaagtactttttgagcctgtccgatagttcttcactgcaaaaataatctattgcttgaatagcagaatttataacattaagaggtgttctaaactcatgggatataagtgataaaaactcatctttcatttctaatgctttttcaagagtctcatttttttctcgttcagcttccaaaagcttgatttgaattttttctaaaactttctgattttccataaaatctgttatatctctgctattaataattccataagcaaagtttccttctttatcaaaaacgggagttccgctcacagaaacatattgttcacactcccctatttttatcttcataaagtattctttaacgtattctccacgtataatcttacaatgttgtatatcttctgccataatctcatatccatctaaatctaaaaactttttgtttgtatcatttggatgattataatcccaataataactcattcttttttgtgccatcttatttttcaagaaaatttcgccatctttattaaaaacataaattgaatcttgcatattatcaagaattgcctgtaactgctctttttgctctaatatttttctttcattattgaaacgctccgtaatatcatgagcagaaaccagctttgtgattaaatttttcctatcatcatatatcggacaaacacttacactataatgaatagttttatctggtcttttagctgtaataaaaaagtttttaatactttcaccattcattaacttaattcctggtagatcatttatttcaagtagatttccatctttatcatagtatttagtatctttgcacgtatcgccaacgcttttatatccattaatatcatatataaatttttctgattctttatttaatagagttacacttttatctggattaaacaaaaacattccatcagatgcactgctaataattgcttcaagttttttattttgctgttctattaacatctgagcttcaatatcatgtgtaatatcacgactgcaaagaactgcaaattttatatttccattgccatcataaataggtcttccatttaagctaacatgttttgttgtagtagcattttttagagtcattctgtcatttataactacctctcccctaaacacttttgaaatagtcatttcttctttaggaatctcatctccatttaaattataaaacttataatgattaggattactaattttcctaagattagtaatcttaaaatattcttcagcagatttattagttaaatagcaatttttattactatcataaataaccaaagcatcgtctatactttgtataatctcatctaattcggctttctgatgtttaatttcctcttctaacctcttcctttcggtaatgtcacgattagtttcaagtactactaactgtccatattcatcaacaaaaatttgatgacttgtttcaattataagttttgttccatcttttttagtatgctctatttcaccgctccataccccgtcttctaacatactctccttaatagtgtttatatctactgaatgaacagtttttaataaatcatgacttatgcagccaacagcctcatcactggtataaccatacataagctctgcacctttattccaataagtaatgcttccatttaacttccaagcgaaaatagcttctcttgataagttcaacatatctgcctgtcgttttaacgtataattctgctgtttaattatttctgcctgttcctcaattttttttctatgtacgacctgttcagttatttccgtaagcattacaacgcaatatttcatttcaccatcttcaaaaataggtattaatgatattctccaataggtaattcccctactaaaaccgtcatactcatattcatctatgttgcatgcgtactttgttctaagtaaattatcccacagcctttcatatgcactccccttaaagcctgtcgtgaattctgatatatgttttcctatacaattttctattttattaaaaggctcatccataaaactcacatacttctcattagttttaagaagcgtcatatctggaagactatatactcctactccataataattatttaaaattaattcatttaaaaatgaatgtttaatttcaatattagaattcattttttcactaaatatatatatatctttttctttctcacatattacttttatattaacaaatttaactcctaaagatttcgtgaacaaaaaatagttgatcttctcatcaatatcgctagtattaatgtttggaccaacccttaatttttcaaatacattaattatgctactattcaataattcctcatagctatactctgttaattctataaactctgtactaacatcaacaattaaatccttttctataactaaaaaaattgaacttttcatatattcattaagcttttcttctttcatctatgacacccccattgctaataacaattatcattagttataatattcgcatagggatattttagcataatatgacatatttttctacaaaactacgtaaaaagtagaattattactcttatttacgtttaccgtctttatcaaatacttttcttaaatgaacctctgtataaaatattgatattaaaacaattattaaagatcccataacacatgttatatttgatcttcctggatcattcccatataaaaaagttatcgtaatggaaaaaattattgatataactgcgcctaatatcatcattgttccactatagctatttgcttctttccatacatcattgtttttctttgaaaaagaagttctatatccataaaaattatttacctccttgggaggccacaattttattataactccaacaacaagaaatactatgcttggtcctaagttgcctaatatctccataaaactttcctccatttaaactatatctctatacatttaaattcatttttatgccacataataaatttttcgaaatctttataagaaattcctatggtcgctgtatttatattaggatgaaaattcacaatatcttgattagctaaatctttatctactaatactataacttctctattagaatcgtttattaatccaaaaggagtaactgatcctggtgttagctttaaatatttatataaacgttcttctgatgcaaacgataacctagtactgccaatttgcttatctaaagcctttaaatcaactctcttattttcatctaaaacaactaagtaatggatatctccttttctatttctaataaaaagatttttacaatgacctccaggaatatcgatttctaaattcttggcttcttcaactgtatatattggattatgctcatatttagtgtacttaatacctaataaatctaatatttcatatactttctgctcgtttgtaatactcattttttctccttttctataagactatatacacgttctcttataactacagcatatttttgaaccttcaaaattatttccgtatttatttcaaattaatcttctattattcattgattatatgtattatctttagcaaggtaaggtaaataaaaacatatcttcctcgctaaagattaatctctaacttaaagtactaatatgcaaattttattgtatttaacatactttcaaaagatgtcatattttcatctgatatttttccacgttgcataagtgtaaataaatatgctttgttactattacaaatcattacttgctctacttgcacatccactcctttaaaattataataataatttagcgttaatgcattattattattaaatttacgctctttaatttgtaagttgtttatatctgagcgattttttatataagtttctgctgaattaaaataaacctcttccgaatatcccttcatgccatctataaccaagttcacattagtcccctgattatctaaatagtaaatatcagctccttttaaagtcgttttagtccaatttgaagggtatgaaactgaaatcttatcagatttagtttctaagcctgtccaatccccattattgcttaaaacatatccatcaataactgtgtttttagccatataaccgctagcataaaaataataccattttccttctatctttttccagcctgtagaatatgaaccaccttctgtataccaccatccagtgctatcattcttccattctgcactcgcgcttatcggagttatcgctaatactgaaaccgctattagtgatcctgctattaatttttttaattttaccattattattccccctaagttcttataatatataagttccatttaataaactttctaatcattgaagttattacactttatacttccgctttaaaggtttaactttgattaacaaatttttagaactcatatataattttatcttacttttgtcctttgtcaaatattccaagtgatagaattaaatagtaatcattgaatgtagtaaaaggttaaaatgcatgaatacataacttttcacatctaacttgatataaaaaaaagaccaggcttaatgcttacataatacagataagcattaagtctggtctaaaaataactagtaataaatgatttttataaaatccatatttattaaataatttgcattactaattgtaactatattctattataagatttattgtgctttcgaatattttgttaatatgtctctatctttattaacttctccagctatagtttgccttaaaaattctaagttttctttagataaccctggaatacgctccataagcaccttatcaaattcatctgccttcgatgttaaaagctcagttgcattttctgtgattctaaatttctcttctactatattccacacttctctagcagtatttatttcttcctgatgctcatttatccttattttttggcctatttcacttttcttctgaataaagaaatctattattgaatttccaacctgcttaattatcactgctaaaattgccactactgaagtatctactataggtaaaatttgattaattaatatttctttcattttatcacgctcctttatcttaagatcttggtttcaattgcaaaaaagaagaagcttattaaagctcctcctattgcagttataaaccacttcatcatattggttaatgacttaatgttttcacataaattctttaattctgtcttaagttcccttgaatcttgctcaagcttatctaatctctctccatgattattgagccttctttcatacgtttcaattttatccttaatcaattcttcattcatgtattacttcctttctattaaaaataaatgctaagttttttgtctatgggatactaaaagcttagcattattacatgtcatgatatactatagaaaataaaaaaagattatttagcttaatagtaatcttttactgcatttttatttaattgactaaaactttattaaatacatacatttctcctttcttctagattttgttcaatataaaattacttggaaaatcttatatataaacaaataaaaaagaagacctattaaaagccttcattttttatattaacttattattgtatattcaggacgcattttatatagagtgttaataatataatatatattcatttcattatctacatatatttgatttccataaccatagttagtataatcatcaaatatccaagttatttctccgttaggtgtaacttgagtaaataacgatttataacgatttgttaagtaccaataattatttttatctataaatgctatttgacctggacctatatattttgaccatatttgattaccattagaatcaaatttaaatgcattgttgtcaatagttgcacaaatgttatttgaattatcaactttaatagatgctactacatttgatggatgtatactccaaattctatttaatgacatatcaaattttactatatcaccatttgacattgcactataaaaatatccatctttgccagcagcaaaattattagatgaaatattagcattagatgggtttgcaggacctgatttactaatatttccatttgaagcgtcaaatattaaaatagctttatttgatgatataactatatgaccgttagcatatatcatatctaatgcataactataattagtagagctttcccactgttttatcccatttggatctaattttacaacgtttagatcataattggaataatataaattgtcatattcatctacacacatattaaaataacttggtctaatattttgtgtccataatctatttccatttgtatcatatttagcaaaaaaatcatcagattgacttgattgtgaataaaaagcatatatgcaattcccattactacaaagacgattaccagattcataatatgcatgatctggacctgtccattttttaacgaattttaaatctattttgcctgaaagaactgtatttcctggtgaatatcctctgcctgtacctgtaactttatttccatttacatatgcagttttaccactagagatatctgaagcagctgcagtagcatctgatgtaaatgtgccaactattccacccacagtcgtaccagcttttatagcttcagctgctaaattagttactataactttaatttttcctaacccattatgaaatcctgctggtattatatattcttgattactgtttgttaaagtagatgaaacagctccattattaggcattgttccaactaatcctgtatcattatcattactaaatttcttagttgctagtacactagaaacatctgcatccccttctgcactagctttgataaaaaaacagtcacttatcgagttataccatacagtatacgcctttcctgctattaagtttggtgatgttgttgttcctggtttatataattttttaccatttatagtagttgcagctccaccattgtttgtacttgctataaaagttattggatatccagttactaacgttcctttaattgtaagtgttattgctgtggcagatccacctgctgtctgatacaccctatctgacaatgttgcattaacatttgaatccccaaatttaacaattgatgcatcagtatgtgggtaatatatatttcctgtactatcttgtatttctatgttttttgttgccatttgtttacctccttacatagtctttagaaataatttgacttgtgttccgcttgcataatcagtaccaactttaatacttgctccgtctgctcctgccggcccctgtggtccagttgcaccagttggtccagcagcacctgttgcgcctgtggctccttttaaacatattgaatatacccattttgctgtgcttgcatctcctgaagctgtacatacatatacattccctgtgcttgtattaaaatattgatcatttactaaagctgaagttataccacttccagtaaaaactattgctgatgtgctagttcctgttattgaagtcccactataccattgagatcctctaatcccagtcgctccttgtgggccttgtataccttgaattccttgtggtccctgcatacctgttgctccgctaagatctgttatatatgtgtatgctgttgaacccttaacatataattttgcattatcagcatcattaatatttccagtatctattaacacaaagctccctatttttaatccatctgaagcaaatcctgtattcatagctgaaactgaactatacacttttgcgattgtaaaaggatctccagctggtccttgcacaccttgtataccttgaaccccttgagggcctttcaataatcctccatctaacttttgttgaaacgtttgtccatcagcaaatgtaactgcatctgcgcttgttaatacatttacttcctttaatactgcacctgtactttcatctaataattgaacccttactttatctaaatttgccattatataatcatcctttcttattgaaccattttagtcgctattcacataaatatttagtttttaatatatatttcaattaagtttctacattatagaattaattgactgcttggcttactagatattcaaatgtaaatttattatttcaatatatacattatttttagcttcctattgaactattttaatactcatattgggacttacttttacattgtctgcaaagccattggttattttatctgttattttaaaatacaaagtatcacttgttctatcagctatagctggcaatgtctcactaatatacaattgcattttccctgataacttagtgctgacttcttgaaattttgactgtagtatttgtatatctcctttagttgcgactactacatttggatctatcttaagatctatgctgcttgcattgctgacttctaatacaatttttatgactaaatcttttgtacttccttctaaaattgttggtttataggtttctgataatttggtgatggcaatcatatctccagcgtcatcaaaaataccagcttctctgatgaaaaagcctccatcagctgctggtattactgtttctacaactatccaatttgcatttgatttatcgactgaaattgcacttatattgcctgaccaaacttcttttacaattgaggtttgatcttctgaaggttcataatatgagccgtttccatctccgacttttagggttttaaaatttactttactgcctgaaactgctgaagctgataatttctttcttcctaattttgttaacattgtataaaatttttctgccaaattaactcatctccttactgggatatattgttatgctttctgaacctgtacattggctgatactactttccatttttccgctgaattcaatatttttagctccccatggataaactgtcatagtttctcccataattgatgctaaaccatagtacatttctgattgatttacggatattagtttatatttaacgcctaaatgtgctggcttagctattcctattgagtcgtacaagctatctaaagcataaggaaagcctgtatcacttattaaatttacttggaaatagtattctggattattctgaattatttcagcttctgaaacaaagctcttacaaatctgctttattacttcaactgttgttgtacctttagagttaagctttgctaatacccttgctcttctttcttcaattgatttagcattatttgtagttattccaactcgttcttcccataatttcaagccccattcagttgcagtttgaggcaaaatttgcaggaataaatctgaaatatccaagcctaatttatcgaagctatttccgtaagcattaaatatttcctggaaaatatagctatttttcatttcatcaataacataactttctagcttatcttttgactcatttccactatcttcacttgaagtacttgcaatcttaatatttttaaatccttctaaatcagctgtattactcataagttatccctcccaaagatgccttatcttcatcagccgtaattatatttttagtatcattgtttatttttatcgaagatatgtcattgactccagctgtcattactacctttgcctcaacagtatttatttttacaactccgcctactggaattgttttaaaataattatcaagagactcttttatattgtctttaacatcctttatatcaaatccatctaatgcagtaagaccaagtatattaacatcaatctttaatggattgactgatactacagttactgtagcccctattggtgccttaccacttccttgaccatctactggatctatatattgtttaactttttgtactatagtatcatctaactgcattccattatttcctgcaactattaccttaacagtgccatttccgttcattccattgcttttatcccaaagaggctttactttcacatattcaacaccagatatctgaagtgcccatttttcataatcatatatatttccactgctgctctcttctctctctttagatatgattctttctaataaattttcactagtttcagtatcagttccactggtagttgcactttcatttttcacattagttatcccatttattttaattggtatttcaacaatagcattagctggaacattatatttagaacctatttccattgctttaatccttagtgtgcattttccatctttaatttttccttgagatattaccttatattttaagccttcaacagtttgaactatgctgttttcatatattatagaattttctaaccctaaaaaagtcacttgccccactgaatataagccttgcttcctctctaagccatgtcttgctgcatctttatctataaatttatcatattcatcttgaggaacctctggagcttcctctccaaatactaatttcaaaattgtatctagagctttataataatctgctatagttttagcagatggagcaatagcatcatatacaaaatatccttcacttttagatattccagaatcaatactatctaacatttgtgatcttaaattttcttcagtattattttcatacattaattgtcacctccccacaatcagttattgctgtaaaagttatggttagaatatcattgtttttatccacctcaaagttttttacgcctaatatgtgctgattttcctttaagcattctaaagttaaccttttagcctcactttcgattaaacttttactgaaccctttaccaattattttttcaaattcattgccatatgcatcgctgtaaattggatactttcctttgctggttttaagagctttccatatccatatttttagtgcttctattccttctacaatttgaaattttccatccttaagtttaaaatcatttttttcaaaatcccaggcatattctttaggaatatctgtagctttctcttcttgtgaaaatgccgcaagtttacttgccatgtttaaatttgtttcgggtaatatactagccactacacttcaccaccttacaaagtattatccatgtttgattatctttagtaggtaagactgctagctcatcgccaatttttattgtatctagaaagcttactgcagtgccatcagtatttgctactgatgcttgtcttgaatatcctgataataagtaatcagctatgtaaagatcatccttatatagctgcaaatcatttgtttgaattattatttcaggaggtggagaattaaccttagcaatgcatatggaaagaggattactttctgcaccttttctcttcattaaatttaacatttttacatatggatccattagctatcaacctcctgtaaatccattttgttgcttaagcttactgtaagcttcattgtatattttcctgttccacattcccaggtatgagtatcagcattaacataaagagttgcatctttcaatatgtctaaataccatatttttgccttaacagcatatcctgttaaacagctataattgccaatggcttcaatttctatttcttcactgaagccatataacttattttgcgctacatcatatgtgtttttaccatcttccactgtgtacgatgtctgaaaaataccatatctttttacaagctctgaattttccacttggtctacatagttattgttggcgtcaaaaatttttactctgtttatcatattttctaaggaatccttatagctcatatctattatgttattattgtccaaatccacattagcagattgaagcaaataatctgatattatttgccccttctcaattacattgaacgtatcagctttcataataggaacatattgttttccattttgcttgctaacttcactatagcactgcattattatgctataataactcttatctacacatagtctacctataggcattccagtttccactacattaccaactttgatgtttaattcttcacaagccttatatacaacactttctggagacatattcttaatattcatgcttgttgatgaactcatgataaacctcatataatcatagcaagtaaaagtttcctcctgatttgaacttcctaaagtcctatctacaacttcacctctaaaaatttctccataagtttcatctacaatctttattaatgttcctggacatatttgaactctaggctcatttatatctgataaggaatataacatgctaaatgagcattttcttgcaggctgatctattgatgctgataattcaatacttttgcaaactggagttatatctgttaaaagccaaccttcatataagctgtatattttaatcatatattaccacccaatatatgatttacatcagttaaactaaagcttgccccccactgacctacaattttttcatttaactttaatgccttatactgctttaatgctaaagtaaagtttatatccccagttccatcattttctccatactcaaaagtttctatagagaatagatcattgatatctgtgtttgtaagtatcactcttattggctttttactttttctccaagcttctatttgtgcaacacactcaaatggtttaggaatgtctgaatatgcacaaaatttatatttatgagcaggaaaaaagctctcaaaagatatttctgaaagctttgaatctcctaatatatttatttctccaattgattctacactaactactgaattgttgttagctaatttaagtgaataactagaaggtggtacaggaagttgtaaccatgtatcgtcttgattaaaccaaaattctatcattttaaaatacctcctaactcattccaagagctgtttgactcaatttattggctagagctgttgcaattttatctatatcgctttcttctctgattattatagaatctgcaagctttgctattgttattgcaaatccattttgtgagctatcatctttagttaatccagaagcacctttaaatccttggctactagtcttgcttcctgatgataaatttttatttacaccagtttttattcctactgcaagatctttaattggttccgttactaaatgagtattaactttaataccacgacccataccttttaaaaagtccggcatccatgtttcataatctgtaagaggacctttatctggaactgagaaatgaagaaatgatcttatcctatcggctacacctgaaatagcatcttcaatataacctactgctccttttataccatctacaattcccattatcatatctttaccccaactaatagcagttttagccatgtctttaaatattgaacctattgcatttaatatatttcttataatatctatggcaccattaaatactgttcccacagtactttttatagtattccatgcacctgaccaatctccatttataacttgcattacagttttaatcactcctgttattacgttaagtacagtcatgattactgttttaattatgttaaatgctgaagacactactgcttttatagtctgcccatgagcattccaaaaggccattatcatatttaatgcagtgcttataacagttttaattgctgtcataacagtcgtaatagtttgttttatacgtggccagttagacattacaaagcttattaatttactaaaaatttgaattgcaaatgttagtactggtttcaatattgaattccaaactgattgaattcctttaaatacattttgaattatactctttattttaggcatattagcttgaataaaggttactattgatttaactactgttattattttattaattgtctgtgtcacaatatttccaaccttaggtccaaataaattagtaaataaagctcctattccttgagctgcacttcctgttttcttgaaggtgtctattgcagcttttacagcacctgaaatcttattaaatactcccataactatatctcttattccaccaaaatttgtagcaaaagcaactgcgagtaatccaactactccaattattatttgaagaggtaatggcaatttagtaaaaattccaaatatagatgaaaagctctttgaaactacacctttaatcttttcaaaacttccagctagtccctgtaatggtgctgatagagatggagttaacgcaccaacttttcccattgattgtttagctatatttaagacattagatcccttacttccaattccagctgattttacagtccttgatactttagcactatttaatttaggaattttttgagctacttttgaagcccgttttcctataccgtcagtagcttttttgaccaaatcattatctttaaaggttttaaacaaatcagatacagtactttttacatttttaatctcatctttcgcatttataaaattagttgccaagtcttcaactgtttttgatgcattagatattgatttaactacctctttagctttctgtccaatattttcaatagatctttccccagtgttatttgtaaaggcttgtattaaatccgaaacagacgttcttacatttcctactgcatcttttgtatcattaaagctgtttttaactttacctactgattctgatgctttagatattgcttgtacactttctgttgccttcgaagccactggtgctagaccttctactgcctttttagctttctgaactccatcaacagcctttgctattacttgtccgcctttattcaagactcctgaggctttccccccattggatttaggaaatttctgagatacttttgaagcctgttttcctataaaattaatagattttttacccaagtcagtacctgcaaaagccttatacaaattcgatgcagtgttttttacattttcaatctcatcctttgtattcttaaaactagttctcatgtctttagctgcttttgatacattagatattgattgaactactcctctagctttctctccaatattttcaatagatctttccccagtattatctgtaaatgcttgtatcaaatcggaaacagctgttcttgtatttcctactgcatctcttgtatttttaaagctactttcgagtttatctactgattctgatgctttagatattgctttcacactttcagatgcttttgaagctactggtgatagactatcaattgccttttgagatttttgagccccatcaataacttttaataatgctgaatctagttcaaacggcattaatcatcacctcctgaatacaaggcttccatttgtttcattttatcttcaacttcttgttcaataaaagcactgatgataatcttttctccaaatcccctattaattgtttctgctggccacttaccatgaagtttccagcagtaatataagagattaacagtttcatcagtgcttatgagttttttatatcttcttttttgttagtagattctactcctgaaatttcagttacagtatctgctaaaatatcaacttcaccaggtaagaatatcttattcataagttcctttggtgttggagctttgaaatgtttcataagctcttctgatctaagctctggcactcctgcaagaacagtttctatctttgcctgcgctgttgcaaatccttgaatatttcctttcttatctacttgaagtactctttcttgaatttcattgtacctctccatagaaatagcattgcatgtaaatgtaatctccatatttccaagtttagcaagcttaagttttacctccttagaaggcacctcaattttaccagcatctatttttaataattgttcaactaaattcataactttcatctccatttcaaatttaataaaattatagataaacaatgtttaatctaggcttatgcaatacctaaccgaagtaagtaacatattgtattccagtttctctgtagcaattttctaaaattcaattaacgtttttcctagttcttctaactataagtctagttattaaattgcatatctataattcagtaattttttatttccttgtcattactttatttttacataccttaagcaaatatctacattagaaatcgaaaatatttttgtgtagcaggcatttgaaaataagctgatgaaggttctttatgacaggttgttgcactttagcttgtccatttgaattattggagcatgctaaagtgagtacaacctgtcatttagaaccttccagcgaaattttcatagtcccgcgtaacaaaaatatttccaatttcggtagactattgcttaactatagttttattgtggttctattaagtctaagaaatcatagcctgagaaagtaaatgcaattgtatcctcaacattctttttaacttcccaatctgccaatgttaattcatcaaaagtaacatctttaagtaccactctttcagctcctactgaatctggatcagctaatttagaaattatagtacatacagtttgctttccttgtttgatgttatctttcattaaaattgccattcttgatgatatatgatgtaatttcaatgttccctttccttctatacctgttactttacttctcttccatagatcccttgtaaaattgacatctacctttgttaaagtgacttttgcttgaagagctgacacctctgaaacatattctccattaatccaaacttctccccaagtcccatttataatatcctttgcttgtggcataataattacctcctaaatatatatttgaaatttaatatcttctattgcatctaaaataacaacttgtcccttaacaaaaacttgtgaaccagtgttactttcttttatttcctgatctttcatagttgaaatatctatcccttggctctttaagtaagctttttgtgcatctaaatcaatttctgctctattttgcccttcaatactgctatcaagcaatccttcaagctctagcccttcaaaataaccattaatagctgcaatgagtaagcacttatgatcataatcatttggatattttccaatataattatcttcagctgttgatttaatatcatcatgtattaaatccataatatctactattttaatctttttaaaatcttcacctttgttttcaatagtagttacaaagctatttacagctctatcaattttaaccttctttccatcgttaattaaaattaattttcctgcatcaattgctgcatctctttcttctttctttagatgcggaacatctaatacttctgcaagtggtgcataagtagcactaatatttagcgaagttcctgctagcattcctgcaattcttgaacagtattctgcagcagtataagttctagctgctgtttttatgtcgtctgtagcaaagttaattactccttcactatcagctggacaatgtggaagtactgctttaactctaatatccttagcacttcttaattgtttaatccatgtagcaaaatctgttgctcttgaagtaatatttgcatctgtatcagcctttccatctgcagtctggccaatgcttgggactactacataatcccatttaatagtttctaagtaattttgagcttctgaataattagctgcatctggtgcttctatataagcaatcacttgttttggtggattttgatatcctatcatggcaagctttatttgttccttattaaaatctgataaagcttccggaatttcatctatagtatccatttttattggattactataatttgctggcattgtatcctttaatataagtgcaactacgcctcttgttcctctctttgctgcagttattcctgcttctttaaaaataatttctactgatggttctcccatttttattcctccttaaattttaaaattaaatgtgcctgctttagggctttgaggtgcattaaagtttctgtcttgtgcaagatctatcttgagtttcaagtgtatttccgacatttttgctctacctctcaactttcttatctttgcagttctccctagtacctttatatatccatcactaaagatttccctcattgtatcccaaacttcattttgagctattaaatcaacattcataagctcatctagcggagcaaagtaaataatcttcatcgttatggtgttcatataactatttctatttaagtctgcttgcctgctggtaacgtagcgaataaaaaaagaaggtcttacaatttccttctctagctttgatgtatatatttttgtatttgggaatttttcaactaacatttcattaattgaattaattaattcattaatcatgaacctcctcctgtaatccctattttattttctggttgctttttaaaatttcattgccaagcactcaccaccttttcacaaattacttccattacaaaaaagtacccagcctgtaattaacaagctagatactttttatatagaagatttaatgtttatgagagggaacttatcttctgttcccacttactattataagccttcttttttttaatttcttacacactttctctagtttacctataattttcttataatttttatttaatgaggtttttaagcttaatagcaatggatatatccttttctatttccgtaactctctccttctatccttgtttcaattattattatatgttaacattttgttatacaaatttttactttaaagcttaacatgataaagctttaatatcatgttaaatgtttgactattaatatttgaatctcttattactattttttaaagctatataaggaggacatatattgaaaaaatttaattacataacactagcaacattaattgcagtatcttttacagctatcagctgcaactcaataggtaaaaatgaaaatactgataaaaaccaaactacagttgaaaataaaactgaagaatcaaataaagatacagataaaaatgataattttgaaactcgtgggaactctccaagagatcaggcaatttttgaagaaaatgaagaaagagataatactgaaagagataaaagatataaagaagttgataaatctaaattaaattatgatgaaactgattcttctcttacatactatgaaactgaaaatagctttgttggcagtgaagctggaatacctagtgtagataataaaaaatacaaagatatattaactgattatacctatgcatgtgaagtaaatccaacaaaagtaacttatgaagatgcaataaggcttgctaaaagcgtgctacctaatgatataaaagaaataagaaataaatatgataattccactggaaaaactcatatagtttactcctctaatcaaggtaattttgtattaggtcttgcatatgattatgacgaatctcataactctggtttcactccaaatttaaagaatagtactgttgttggaatagattatatgaaagaaataacagaatgataaagaaggactgtagcaagatttgcataattacaaatctactacagtcctctattctaagttaatggaatatcttgttaattccaatttcaataaacgggagtatcacaagaatcttatcttatcctgcaatctatgaacataccataagtatcatcagaaatttcatttccacttctatcctataatgctctgattctaagatactctgggtgacttataccattttgtaatctgcttttatctagtatgctgatttagctttatattgcgaaatctaattagttctaaaaatctcaaaatattttgctggaacataatcagttaaccacactttgttttcagataagaagaatttatatccatctttattcatctgctcactgttaattttaaatataactaattctccatgtcttttacctactttcgtggctgtttctatatcagctgataagtgaacgtattgtctattctgttttttgataccctctctacatatgctatccataaacctagttgcagttccatgatataatactttaggtggctcaacagcttgcaattcaagattaacttttattgaatggccctgatttgctttaattttagttttatcattattaaatgaatatctttgtttaccatcttctgcaacaattctttcaatatctgaaattgttaccttatatccttttttatttaatcccttaattaaatcagaagtattaatatatccatattcatctaaagtcaatccaatttcctctggcttatgccttagtataaggcttataaacttactaattctcatatctttattactcatcatcgattaacacctcattttctacaatctattagcttatctaaatatatatacttttattgcaaactccattttagacaaataaacaaatattatctcgcttaactattaaaatagaattttgatttattatgtatctactaaacaaactagaatttattattaataattgatatatatactaattaattttaactacttctttaataattcgacctaaaaaccaattaacttatattttaccatactctgaaatgacttgaaaaactttacgagaatgtattcttccattatgacatacatctaaagtcttagaatcctttaaatgaaattcctgtacatttgccagttccaaatttcatcatgtataatgataaggcaactaatgtctcttgcattaatttgacaaataaaagctttaagtagtacttatatgtctagacaaaatattttatgactttttctttttattttactagaaacggagtacaaaaaatgactaaaaaacaaagttctattaaaattacaatcagtgcattatttattatacttatggtaggtacacttactactgtatgctacattatattttctaattggaaaacctcgtcagataatattataaaaaaattggagaatgaagctagcaataatatattaaataaaattgaggcacttgttggaattccattgaatacaaatgaactaaatcataatttaattgaaaatgataccatcgatatgtctaataaagaaaaacgtgatgcattctttgctggagtagtgaaatcaagcaaagaagaaatttatagctttagttacggtatggaggatggcagttattatggcgctcgaagaaataaagataacaacatagagatatataggagtactccacaaacaaatggacattctctctattattctgtaactgaggatttgcatgaaggaaattttgtagaagatttcggagcctttgatccgcgtacaagagactggtatgaaattgcaaaagaaaaaaagcttcctatattttcgcctctttacaagcactttgtaaaggatgatctggcattatctgcagcttatcctatttatagtaaagatggcattctacaaggcgtactgggtactcatataattctttcaagcctaaaccaatacttgaaggatattgttaaagataataacggaattgcctatattattgaaaaaaactcaggggctctagtggctaattctcttgataagcctaactttcaaaccatttcaggaagcaatataagaagaattaaaatcgatgaaaccgagaataaacctattgctgaagcctatgaaaattataataagacatcaaacactaacttcgtcataaaatcgggtggagataaacttcatgtgaagctaactgaatacaaacgagaaggtttagattggttaattataactgctatacctgaaagcctgtttacaactgaaataaatgacaatattcagactgcagtatttttctcaattgttgctcttcttctatctttgactatttatttaaagagcactgagattatactacgcccaattaatcatttgataaatatttcggaaaagttttcaaaaggagacttgcatcaaagagcaaaaatctttaaaaacgacgaaattggaaagttatctagtgcttttaataagatggcagaagaattacacatacttatagataatcttgaagaaaaagttgaagaaagaactaaaaaattagaaaaaacaaatacagaacttaagcacgcaaaaatagaagcagaaaaagctaatgaggctaaaagcgagtttcttgccaatatgagccatgaaattcgtactccattaaatgctgttattggttttagtgagttgctgaaaaacgcaataaaggatgaaaagcacaaaagttatattgagactataaatgttgctggaaacagtctgctcactataattaacgatattctcgatctgtcaaagatagaagctgggagaatagagctgcagtacaagcctctaaagcttagcaatatctttagagaaattagaaacatgtttagacaaaaggctaagagtaaaaatattgaatttgtaatagatattcagaaggactttaacgactatatccttcttgatgaagtaagaattaggcagatactattaaaccttgtaggaaacgctgtaaagtttaccgataaaggatatgtgaaactttcattaaaaggaactatttctaaaaacaagagcagtgtggactttagaatttcagttgatgatacaggaattggtattgctgaaggtgaaagagagaaaatatttgaggctttcaaacaggtatcaggacaaagcatcaagaaatttggtggtacaggtcttgggctatccattactaaaaagcttacagaaatgatgcaggggaaaatttttgttgaaagcattgaaggaaaaggaagcactttctatgttgaattttataatgttccaatagctgcgactgaagaacttcctgaagatacaagtactgcttattttaataagtacaacttttccaatgaaaaaatacttgttgtagacgacatagaaactaaccgctttttattagaagaattactttcaaaggctagtcttaaggttataactgccaaaaacggacttgaagcaatagaagtatttgagcaagacaaacctgacttggcaattatagacttggttatgccagatatggacggtgcccagttatcatcaaaacttaaagaaaatccagaattttgttgcattccaattattgccctaagtgcatctacctcacaagacgtacctaatggatgtaagttcgatgattatttaatgaagcctgctagcgctgaacagctatttagcaaaatatctaaatatattaaaaataagtctgaaaaagatatacatatttcctctaagattaacgctgaaaacatactttcagctacaattgattctgataaacttattgattttaagaataaagtgataccgttgattagaaaattggaaaactcaatgattataggtaatgtaaaagatttagctaagatattaatttcatttggagaacagcataattgggagtttatatccaatgaaggtgaagaactgattaaaagtgcagaaagttataatataattaaaattaaatcaagcttaagtaaaataaaaagactagctttggaggatggactgaatgagtaacattaatagagacttgatattgatagtagatgacaatccaaataatatacaggtagtagctacaatcatgtctgaaaatgaatatgaactgggtattgcaatgagtgctaaggaagcctataaatttcttgaagaaaacattccagaacttattttgctggatgttgatatgccagaaattgatggttttgaggtgtgcagtaccctaaaaaaaagttcaaagtataaagatatacccataatatttctaactgtgaaagatgaaaaagatgacattataaaggcatttgatttaggagctgtagattatgtaacaaagccctttaatagaaaagaattagtttctagagtaagaacacatatttcattaaaaaagacaaaagatgaacttaaaaagaaaaaccttgagcttgaaagaacattagaaatgaaggacgagtttctgtccctaatatcacacgaatttagaacgcctctcaatgttattagctcagcaattcaagccatgaactatatttgttccaatgaattatcagataaggcaaaaaagtacttacgtatgataaggcaaaatacttttagacagctaaggctagttaataatttactggatatcacaagagtaaatgcaggacgaattaaaattaataaaaagaatgtagatattgtttttttaacaaagtctatcatagagtcaatatatacctatgtagctctaaagtccattgatgtaacatttgtgcctctaattgaaaagaaaattataggaatcgatgatgagaagtatgaaagaatacttttaaatcttctttctaatgccattaaatttacttctaaaggtaaaccaattattgtaaccttaagttctttaaatgataagatatgtgttgaagttaaggataatgggataggtatcccaaaagataaggtggacattatctttgaaaggtttggtcaggtagacagctctctatcaagacaggcagaaggcgcaggcattggtctgtcgctggtaaaaaagtttgttgaatcgctaggaggcaatatttctgttaaaagtgaattaggcaaaggcagcacttttactattttgctccctactgagactatatttgaagaccatatggataaagaaccaataaatttattggataaccgccttgtgcaaaatacaaggatagaattttctgatatttatttgtgatgaattatgaattgtacttcatttagaaactctttttgacatggaaaatactccttcttaatagtagacattttattattttatgtgtctaccataagagggagcagcttctttattatttttgtttatattgatacaaaataattatacatatcttgagataatacatttacatttaaaacctcagcctcataatgcttaattcaatgtagaatgcagaaaattaatttcaatatattatacaataatatatttctatttttacaggttatatttatttttattctccttcattatataatgtattgcttcacttatgggattatcgttacaagatgatacaactacattagctacagcctttactttatctaacgaattgctaactgcgaatccaatatttgcatagcttatcatctcaatatcattattgtgatctcctatgcaatagacttgcttgtcctgaaattttagataatctattaatctttttaatgcatctccttttgaaacattctctcttacaatttcacaagaattatcccctgtatatataaatttgtgattcatgatagtattcacttctatatatgtgttaaaggcttctttattaaccaaatctctggtcatttcaacttttatccatccatcaggcaattcatcaatgctatctacttttataaaaggtagcctttctctctccataaattttagaaactctggagtggaattatatgagaataccccatctgccgacattacctgtatcccaatgctagggaatactttaagaatatttttaacattttcccttacctcttccccgagtatcgtactccaaattatttcatcatttttgtcgtcataaatcacagctccattatagagtataacaggaatatcaggttttattgtatctttatatggtaaaaaacctgtaactgatctacctgttgctactgtaaaagttccgccatgattttgaaggcttctaatcgctttaatattcttttcggtaataactttattactattaaataatgtttcatccatatctgatacaaacaaaacatttgataaatccattttttcgcaatccccttctttaaaaattatatttttcttaaaaccttttcattcaatgcatcaatactttaagaaatctataaaaattattcatactcattgacgtttataataataaacaacatatatatttattaagcatgccttagctatatgaatcactgatttatattattgacattatgagatactctttacttaataattctattgctaaggcaaataattatataaactttattagttatggtgctaatatagcaaatttagctaaaactattgatattaaaataacaccaagcaatatataagtcactttaatattcttacctaacagccaatatataaggaatgttacacctaaaggtaataaacatggcattatactatctaaaatagtctgcactttggtaactgcatcacctgaaccaaaggttagaggaacttttacagataccatagtagctatcatagaacctattgtcataagccctagaacagcagttgaatgtgtaatcctattcattaagcccgacttttgaatttgatttaacaatcctgcaccaacttcgtaccccttcatcatgccaaaataacgaagtgcaaatgccggaatattatagatcaatagaaaaagtattgctccaaatatacttccatttaaagcaagagaggccccaataccagctgcaataattcttaatgttccaaggaaaagagaatcaccaattcctgacagaggacccattaaacttgctttaacgttattaattgattgagtatcgaaattaggatcttttgacttctgctcttccattgcagttactattccaagtactaatgtagaaaaatataccgttatattaaaaaactccatatgtctttttagggcttctgctctatcttccttattcttatataatttttctacaatcggtgtcattgaataagcaaaccccatatgatcttgccttacataattccatgaaatctcaaacggaagtgacttccaaaaaactttttttaaatctttcttggtaattaattgatcttcacatatatcactttgcgtattaatatttttattagaaatcttcatccaactctgcctccatcactttggtatctttttggtcattatttaaaaccataactagcacaacgcaaatagccattattgcaactcctaatactggaagttttagatatgcagttaaaacaaaaccaatgaataaaaatgcagcaacttttttattcataatcattctaagtaaaattgcaaatcctaatgcaggaagtatgccagctgaaatagttaacccatcttgtataaattgtggaattgaatttaatatagtttccattacactgcttcccaagtaaaatgacaatgctgttaatattgctagtggaagatacattccaaatatacctccataccagtgcattcgtgatacaccttttatatcgccttctaatgcatatttatctgctctatttgcaaaaagtggaacaatagcaataaacaaaaaatttcttaataacataactaacatagcaattggaagtcctaatgcaactgccataccagcatctttatgtccaacaattgcaaacgctgtacctaaaatcccacctgaaacaacttcaggtggaagtgcagctccaacacctactgcccccatgaatgctaattcaagagttgctccaattatgcatccagcttgtaaatctcccataattagaccaaccaatggacataaaaccaaaggtctggtttgtagtgtttttcctgtaaaataatcactgtatccaaaacaagcaactaaaaagattaatactatttgtaacaaagcttttcctctcctttcttaattaaagaacgctaatagctttaattttcttatctcctggaacttgtcttatttcaacttctactccatcacttaccatttttcttataagctcctcttccttctcagaaatattaatagcttttgaaatatttttagttccttcactagctttaatgccacctaaatttatttgttttacccctggaacattctctgcaattctagctgcatctacaattgattctacaactatgaacagtttatacttatctgtaactccgcttcttaatgccacaatagaatcctcaatgctcttaattactaattttacaccactaggctttgctagtttaatcgttgtctttttaagctcatttaccataagctcatcgtttgcaattaagatacaatcagcacctagagttgatgtccacgataccgctacttgtccatgtaataacctatgatcaactcttgttaataaaatcatattaattccccatttcttaaaattcgtcatcttttattatttttgaagtttctaaaaccttattacaaaattgtattattcctttagcactttgtaatgcctgttcaattatattgcacatgctatcctcatcaaattgttttgatatcaattcaatcaataaaggtaaattaagaccagatattaaataaatctttttatctgtttctcctacgatattcatgcattcattatttacacttccaccaaaaatatcagtaataattatcaattcatcatccgattgtaaatcttctataaaaggtgtaagttctttttttaaatcataattttctgttgtgtacgcacaaatcgtagagacattgctctgctctcctattatcatttttagagagctatatatgccctcagcaaaatatgcatggcttgctagtaaaaactttctcatatatttacattcctttcaaataccattctggtgatactttttaagttatcaccagtaatagctatattgactaatattctactttccacatatatctacgattcatatagttatgttttttagcatatgataattcccttagatatacattgtttaatatagatgagaaaattaaatgattaaaaaattctgatactttatcgctgattctattaattcctaattcttttgcatctattacaaataagcgttcaccatatttttccagaaagttaagagctcttatatctacaggtcttgtacgcccttcgcttattaatgctaccattgcaagattcttatctactgcttcaaatggtccatgaagaagttctcctgtattaactgttggcgaatgcacccattgcatttccattagattgcatattgaaaatatatatgctgaccccatgcttggaccaccacctaatacatatatagtttcatcgtttttacacttctcagcaaactcttctgctcttggtttacaatactttactgcttgacgataaatatcgtcgataatttcaaaaccttcttctgcttctttgtagtattcatatccttctaactgatgcaatagttcgaatgccatatgcaagccaatgcttgaattaacattttcaactttagtttcatctaaggcaatactttcatatttatacttgtattgagcaatttctgtcatatgagattcttctacatataatgcaatagtagtagctcctgtagcatttgcaacctctactgcaactccagtttccttagttcctctcattgagcaagctattactaaggtgtttttaccacatgattttggaacagcatgtacaaattcattagatgtgtaaatttgagtttttagggtcttagattctctatctaataaatatttagctggataaaatcctgcataagatccaccacatgctacaaaatatacactatcaattcctccatctttctcatgtttcttaattacttcacttataacttcttttattgtcatttattacaccttcccgttatacattttatacgcttaacaagatgtatggtgacgtcactaccatccgcacctttatattatcacagcccttatttcttgtaaacccatttactaaaaaaataaatacatctgcatacatctctcgtcataaacccttatcttcactgcgctacaccaataaaaaatttttatttaatcacacatctgcatacatcatcatttttattcactttaacttgtttttttgaattagttatagtagtataaacatacaggtaatatagaatcttagaatctggaatgaaaggtgatcataatgaaaagtttaaaaagtactagcagcatgacattatatgagcaattggctaatactataagaaatgatatttacgaaggaaaattcaaacaagacgaacgcattccctctgaattagaattaagcgatatgtattctatcagtagaagtacagtacgtaaagcaattacactattagttcaggaaaagctgcttgtaaaaatacatggtaagggaacttttgttgcttcacctaaagttgtaactaattcacatagttttcttagctttactgacaatgtaaaatctatggggcatacattagttactaaaacaataaaagtatcttttcaagaaccatctcgtgatgatatagaattcttttctttagctgaacctactgatgaagttttagtaattgaacgattacgttttattgatggaattgccatcggtattgaaacagttcattttcctaaagaatacgaatttctaaaggatgagaatttagataaatctctttattctatcttaaaagacaaatataagatttatccttcaatgggaagtaaaacaattgagatatgttatgcaactctagaagaatcaacattactagatgttcctagaggtaccgctttaatgttgattgaagacaaagtttttgatagtatgaataatcctctccatatttcaaaacaagtaattcgaggtgataaatttaaatatgccattcaataatattttttaaattgcgttagaaatacatattggtataattgctacctgtattgtaattatactgcttatcatcactaggcatgctatttttcatttattaaatgtataaatagcgtgtcctttattatctaaaaaaataaccttttctaacatttcttttatcttacttctttccagctcatctatcaaaacttcaaaaaatatacatctgcaaaatatacctataactgttctaatacgattatagaaaaacttgtttcatattaatttctgcaatccttcttaagtatattttcaagataatccatagaagctctatactcttgtaagttgacaataagtcatattagcttaaccttcatcttttatgaacaatagctgaatcgtaatctttaaaattttccagtttataagaaaacttatcttcctcgcattttttaatcactcacgtaattattcatattacaaaacttcccataaacgcattattgtatttaggttaataaatcacatattaaaaaacggttatttaaatgaaaatattacttcaagctaatctgcaataaattaatgtaaattattttctatttttatataaagcatacattctcgaccgtatatctacatgtagaaattaacttaacactaaacacaacatatgtaaattaatcaatttagtttgcagccattaaacgaggaaggaggttcatatgaattttgattatattgaaaatctggtgagaagatgtaaaaataatgatgaagccgcaaaagaaaaattagctgatgagtttaagcctttaatctataatatctcaaagaaaacttttgttgatggatacagcatttatgatattcagcaggaatgttataaatcactttttaaatctgtttccatgtacaatttggagaagcataggtttgttgcttatgctactaatgcaataaagaataatgtaaatgatttaattagaaaaatgaatttcagaagttctactgacagtaatgatgctttaagtttccatgataactatgaagaagatataccttcacaagaaatatctatcgaggcttcattatgtgaaatctgtgattatgaagatttaaagttagctcttaaaactttaaatgaagaagaaattgaacttataaattttgtattttataagaatcatactgttaaggaatatgcctattttaaagatatgtgctactctacagccgttttgaaaaagaaaactattttaagaaaaatatttaatagcatcccagtatattattaaaatctaacagctccaaggttaatatttaccttggagctgttatttttattttactggaatataaattcctaaagaataaaaaaacctaaagcatgaaagtatatttataactatacttttctactttagattaaacaatttggtggctcacccgggaatcgaacccgggacaccatgattaaaagtcatgtgctctaccgactgagctagtgaaccagaataataattataatagaatgcttttacaaataattaagctaaatcaattgccttgcagactactaatatttttacatggggtgaacgatgggactcgaacccacgacaaccagtgccacaaactggcgctctaccaactgaactacgttcaccattatatggtgcgttttaagggattcgaacccctggcccacgccttagaagggcgttgctctatccagctgagctaaaaacgcatattatttattatgttgcaaactctttattttttttggagcgggtagtgggaatcgaacccacctttccagcttggaaggctggagtattaccgatatacgatacccgcaactaatctgcttgtttattatatgttacatattataggttgtcaacataaaagtttaatttttttcaaataaagtgctgaatattgtatttttttccgcaaattcaccgtatttataaacctctcacttagcagtatcacacgctttgacttttttcttcgctaaattaatataaatttataaatatatttaaatttctatctctttgagtataatgcttttcaataataagtttatatttgaaattttagtaagcaaactgctcaataaataatctaatattaaaaaattaattatcctattcaattaaattttgatattaaattagaattcactctcaattatttattagcctcttcttttttattccatgtcttattaaatcaaaaatcaaaccataaaataaaaatgttaacagatgtgctatatatatttttatagtcacaggaggttgagctgataaactgtgcctaattacagtgccactatctaaccaagttctaaatgactcaactaatacttttttcatttactcccctcccaaatttattttcataaataattatttcatattaatttattattgtcttaaatttttttattaccttctaaaaaattcaatcatatattatatccctattatactccactaaaagttgttaatttaaatactaacctctccttaagccgcatttttcaagcatattctgaagaatatatattcttctatggtaatattctagagaatatttattctccagaataaatattgtgaagaatattagaatattctctttttctgcatatatcttaagtgagatatatgagaattcaaaagagcttttcaaaaaagttatcctgcaaaaagttagagctcaattttttcatttgattaacagaattctttcatttgatcttttatatttagaatcatacatttcttttctgttatcatttatagaaagaatgtacaaaaatttattatacgaggagaacacttatgagtaaaagaaaacaaaatgaactaccaaaaaatgattttgcaccagatgagaatgaagaaataattggttttacacctgaaccagtcatttctggcaagtgcatttcatctttttcatttgatgatgatgaagatgaaataaatactgctatgtccaataacagcagtaataataataattgtagttataacagtaataatagatcgtctattgaatctaataatcctgctctaaccatctcatttgatgatgaagcagcatctacccaaaatgttaaagcatctaattctaatattcttgcagataatagaaaagtttcattagcaaatggcatggctccacctattgatggtgaattcctagatattaaacgaacttatatgcttagatcttctactgttagaaaagttaatgaattaaagagcaggcatcctgacttaaatacctatgtaagtactatagtggacatggctatagctcactactataattacatagtaaatgaaggcgaaaaaaaagaataatctactagggtgtaatagatcattctaaatactggttatcatttatttaataaggggtaaataatgattaactatcttataaatttataatactagatgaatatgtcaattgtatgacaagctataattttctaaaccagttcttagaattttgtaatagtctatttttcttaacttgccacaatatattttgaatataatttcaccgctttcaaatactataaattatgaaaggtggtgagtataatgaaaaaatttattgttacattttctattttttcattcttattatttagtataactacaataaactcttttgctgttactaaaactttaactcaaggactttatacattaaaggattcaggattagtaacaggcactgattataatgttgaaaataattcttctggtagagctatgcttcttatagttgatagcacccaattaatacaggagttaattcgttttgaacctaattctcgcaaatatactctaaagcccctaaattatggagatataattataatcattggcgcaggtaatctagaattctcttaatgagtatacttatgattttatcaatacctgctgactcattgtcatccagctatctattaatatacttaagcattttgtattaatatactgatatattgaactaattttcattctatattaaaacaactttttattgctttatacgagacaaaattataattgtagttataatacatgctgttccaatccattgtgctattccaagctcctcatgtaaccataatacagataatatagcagccgataaaggttcagctgatgataatatgcttgactctgtcggctttatataatttaaactttctaagaagcaagtaaaagcaattaaagttccaaataatactacaaatataatagctagtattgaattagtagaccaaattccagtacaattccatggctgctcaataaagctgaaggctattccccctattaacatcccccacccaactactaatatggatccccattttctaagaagtaagcgaggttgtaatgtataaaaagctgctgcaaatgctgatgcaattccccaaaacaatgctaaccttgaaatagatatactatgaatattcccctttgtaatgataaaaaatgtacctagcattgctagtccaatagcaataatttctttaagctttggaatttttttgctacgaatggctaaataacaagtaattattactggtgatgaatattgaagtattgttgctgttgctgcattcccatatttaattgctgcaaaatatgtatattgtactcctagcatacctaaaacgctaaaaaatataagacttagtgcatcattcttacttttccatacttcccatatattttgctcacctttcataaaagtatataataataaaattattcccgatgataataagcgtattacaacaagccactctggactaaatccttttttctgaaataagtattgagcagcagtacctgatattccccataacatggctcctatgattaccagtattattccttttatccttggctgaaagttcactatgcttcctcctttttgtatttattcttaattaacctatatacattgcaaaaataattcttcaccataattctaaagatattgcaagaattttagccgtaattgtgcattgttaaatatgcattatgaatttcaacatgtatactatgatttgcactatctattgcagcaagttgcgattatattgatttaatcaaacaagtatgtaataattttattattatttctggcattaaacaattaatatattatcagaaattaaaactatattagcgagatgataagaatgcaggcaacaagaatagaagtgaatgataatttgcaagaaacagtaaaacatggttctcatgattttccattagcaatttacactgacaaatttgatctgtttgaagatgggtatataagatggcattggcataaagaagtacaattttcatattcactatatgataaagtagttgtatatatagaagatgaagagataatattatgtccaggagaaggcattatgataaattcaaacgtacttcatcaaattaagccatatgacaatagcaattgtatgatgttttccattgattttgattcaactttaattggaggaagtgaagaatcacttattgaaaaaaagtacttatctccaattattgagagtaataatttgaaatttctctctttaaaacctgacgttccttggcaaaaaagaatcttagcgcatctggaacaagtttttatattatctcataaaaaatcatatggatatgaattagaaatgaaaaattatttaagtattgtttggttaaacttaattaaagaaataaaggaagatattaaaagaactgtaccttcagcatcaaatgatgatgaacgtgtgaaaatggcaatgcaatatattcaaaagaattatgcagataatattgatctagatagtatcgcaagagctgcaaatatcagcaaaagtgagtgctgtcgaagttttaaaagaattttgaaagtaactccttttgaatacttaatggaatatagagtttcaaaagcagcagagctacttctaaaaaataaggattccatttctaatatttctctcgatgtaggttttaatggcataagttactttggaaaagtatttaaaaagtacaggaattgttctccgtctgaatatagaactaaatattgccacaagtaaagtaattataaaatatatactatacctacagcgctatggcttacttttattaataacataagcattttatgcatttacggaatattatatatataaagaaactctatggtactatttataaaaattaatccgtaggagatgtaatttatgttagaaaataatagtaattatatactagataataaaagtggtaaattacaagaagtagttagcattcctatttctttatataaatcaatgagaggaagatactttgtagggcagacagaaactttatgggttggtaatggttcaaatgcctgggctggtttagtaaatccacgtaattcagatgtcaatttatatgcaaatgtatttactatttcaaatttatctaatgactatttaactgcccaaatatggttaaatactagttttcctgaaaaagcttgtgtatcccgtaagacctctccaaccaacactgcgttaaagccaataccaaaaaacaaggtagatattagatttattgagtctactagaattgttcctaaagatggagttaatgtatatgaaagaatagtaccccctaatacaacattagtaggtgaggaagatggaaagtttatagaagctccaggtggaaactatactctaattataaaatcatcaaatttaataattgataaggtagtagtcgcatttggatggtgggaaaaaccaatatgtaaaaagtagattctattaaatatctcgcctaatgttcccccccatatgaataattatttttaactcgcatatactatgattgcttctcattatgttattatttacgaaatccattttgactccattattggggtcttttttatgcaaagaattatttattaatatttagaattatttaaacttccccttcatataattaaaggaaacctcttgagtgttatttttttgttctcttggttacccttaattcatagttacttttttgttttaatccattcactttttggccccttattttaggggcttttattattttttacatgaataattttatgaaatatccacaaactagaatgtcttcataatcaaatcaaaactccatttttgatctatttaattctaaatatgtgatatttatattatgtattatttaagatatattagagcatgatataaatcccccataaatattaattatcacatacatatatgcccctttattggggcatttttatatttaacaaaagtcatagaaaaatcaccttaatttaagtatgataaatattcaaatgctgttattccatatatgcttttaaaatgcttatttaaatgtgttaaatcaacaaaaccacactctgctactgctgaataaacatctctatttttctctattaacttttttgccatttctactttgcagttaagaaaatattggtatggtgaaattccagtattagctttaaataatctaataaactgaaattttgacatattaagctctctacaaatatcatcaagccttaatacattctctaagttataataaatcatattctttgattttttgattaaagcattttctttcttgtaacttatacaaagatcagtttgtgtaaaactatctgcaagagataaaaaaaattcactacacaatgcttcatcttttcctcttaatattgcattagaaagatttaatatttgtcgttcaagtctataattataaataataggagaagaaaaacgaactatatcctttttttcaatactctctaaaaataattttggctcaatatataacataatataatcaagacctgtctcatcatgtgccattccgtcatgtggctgttcaggattaaaaagcataacaccattttgataagataattgcaagcttccatctaagttatactgctgaatgcctcgcaacgttacacctattgcatattccttatgagagtgtttcttatatttaaagtcagcaaaacttgctgataacgcgataatacctgctgattttttatatacaaatttatccatacaaatcaccccttaatcagctcgcctacaccagatactattattgcagaataaactaaaaataatgccataattatattaacaattttttgatgtttctgcaaaaatgtcttaaaaattgtgccaaaaagtacccatgtaataaatgcaccaaatccaataattgttatatatgcaacaaatatcattaaagcagatagtttagtatagtatggcataacaaaactcggaattactgtcattgtaaataatacgacctttggattcacaaactgcataagaaaccccgataaaaaagttgccgtttcttttgcagttgattttgatgtatccatcttgcatatttgataagcaagatagagaatataaagacttccgattatctgcatgatgcatagaatttttggcaaaaccgccataagtgcagtatttaaaacagctgaaataataagtaataaactaaacgcaatagttgctccatatgtatactccattgctttctttgtcccccaattatttaccgtagacaatattacaatattcgtaggtccagacgtaactgtaacaataatacagtaaataagaaaagatgtaatattcatgaatcaagcccctttcaaagtattctcatgaattatacatctaaccctaaatagcatatagtatattattgcaggattacattccccaataaccttctagtatgaatcatataatcgtcttactttttgtttatttcatcttttactgtaattatttcatttacctatattaatctaaattctttttcatcaatatatgtagacaatcttcctctaaataagcttctccctgcttttcatacccttgtttttcataaaattctgcaactcgtgcctgtcctgacaacattacgctttttccaccttctcgagtaatacagtcttctgcagcattaagcattttagctccaatatttttccctcgccattcctttaaaacagcaactctccctatgataaatgactgtttcttactattaaaatagattctacaagttgagattggttgttctccttcatacataaccatgtgcttagcaatttcatcaatttcatcaaactcttcaacaaaaccctgctcctttacaaacacctctactcttatttttttagcctcttctggcaagtagttatactctttaattatcattttgcgacctccttcaaaacaaaaggcatccaaaagctaaccttatagtgtgaaaacacaccgtacctacggctagcttttgtatgccttataatacaatcatccggtgatgaaagtataagctctcatttattttttaagtaaattatatataaaaatttgttgtaagtcaacgatagattttatctatatttatataatgacttatcaattattttagatactttcattggtctattattcaaaataaaagccatttttatcgactttataccaactatctatttacatactaattcaaattcttcacaaacaacaaccatattttcatcaaaatcaagatcatactcttttaattcttttgagaaaaaatctttatgtgcctttctccaatatgccaaggacaaatctccttctccatccttaagtgcatgattttctgacacttcattaaatgaacaagtataaactttggtcgttttagttatgcaaacagcattattatcagtgtctaatataatatttaaaccacccactgctggcagaggactgttttcaatttcatatagctgatacgctgatgcagttgctgttttaataccatttacaactagttttgcgagtttatttgcaatcgaagcatctccaccaaaacaccaagcatcataagtcttaccgtagaatcacttattacttagacccacaaaatttatatccatcttacaacctcttctaatggctttcgtggccttggatatggtgattgatctggatatccaattgctactgctgctacaagttcatctttgcaatttaaccatgagcatatttctctgtcacaataaaatatgtcgcaaatccaaagagttcctagtttaaaatcctgtgctgctaaaagaactgtttgtattgcagccccaattgattgagtatcagtaagtaatctatgatgattataatcttcttcaatattagaaaaagtattaaatactaagattactgccgatgcttcattaattgaattcatacttgactccaggctaccagtagatttattctcttttttattctggtgtagtgaattctccataattctcaccatctcatcttttgtgttatcctgggcaacaataaacttccatggttgacgattctttcctgacggtgctttagttgctaattctaagatcttttctattatttcttttggtactaccttatctttaaactttcgtatacttctacgctcttctattgctcttattacatccatactaatctcctaaatttaatacttttacttgaatcataaatctacagttacttatatttatttactctcacgaattaacataagctattattttccctatattcttcttatctgtaaaatctactggtttatcataaatagcaagcattcctttttcatctgctgataaatcttcctttttcttattttttattttccatttcaataatgtcataagaaatttatcaaaagaacttagcttattataattaaatccacctcttagataaaaaaatttgatatatttttgctcatctactgtaaagtttttatttattacttcgtttataacattatctcttaaaggtgatgctcctgttgcaaacactactaacctcttatctttaattttgttaatgttctttttgattaaacctatcccaataatgcctaccgcatacaaacttccaccataaattatagtatcatacttattcaaaatattaatatcaacatttgatgcattaaaaatatctgctgatagctcttctgcaatccacttcgcatattttttggtaaagcctgttttagatttatagattactactgttttcattatccacctctatctaagcaattatattaaattacagttatataaagattatctttttctttgtagacttcattaatttcttctattttttcatcaagactcgaacaatttttaggggtcttatcaagttctcttttattacaagtatgaatagaacacaaagcacaattatacattacaaaatccttctccaattataaccctttttgaaatactatgatttactcatgaatttgctgcataatcatattccatattaaatcaattatagcatatattgtttatttattttgttgtatattttccataaactgtgtcaataattaaaacataactgcatattaaaataaaaaagagatagcttttatttattatcattcacctgatttttcgctatctctatttttgcgccaaaaaataaagataaatcagatatccttctctaatcaatctttatttttatgtaaaactaactttatgttgttatattgcaaataagttttttttgtattacacataaaaaataataaattaaacttcttgaataatacaatttttcaaattaccatttgctttatagcatttataactatacacatattgtttattaaatttagcctaaatcattattatctccaacgtttaagagttggtaataatgttgtcatttcttttcttgcttcttcttcccctattacttttcccaaaaccggtacaattagctccaccatttctttcatagacatattgggatcaataaattttccgtctttatagcaatttgtacaataaatactctcacttccatcttgctcttttgctataaaatgtgcatgctcttcattaaacggtaacccacaactctgacacatcgctacttttgtcattcttatcattcctttcatataatacacataattatttaaccaactactctcctacgtttattataacatagctaataaacatgctactatttaatcatcactaaataattataataataacattatcaccacttattcaaatatttctaataatataataattatcttatgtaatattacattaaatctttttatttttattgctatctgaagtaactattttctcgtaattttatatagtatataatatagagaatatttctcatatttaatttgcaatctgatcatggtaccttctactactttctgcagttagtttaaatataataatagcagtagttttttatctactgcttttctctgattatcaaaaataaaatgaaaactaagtatttaattatttataacagaaataaacttctcagttaaattagatatcttttcattcttacgtgtacaaataacaatttcattttttagatcaacattatctacataaattctagccaatttccccatgtcaatgaattctttagcagcaattgatgaacaaaaactcacaccatatccatacgtagatgccataagagtttcatgtagcccattaaattcaagagctatatcaggaactttaatactattaatatgacaaagtgattccaaaagtactctagcataacttcctttttcccgcattataaatggttctaacataatatcatttatactaacctttttgtttgcatatttgtgatttggtgaagctacaaaccataaatcatcatccattattttaatggtatcaattctgtctgtatatttcattgctccactacctaaaactgcaacatctactttatatgagataagatgatcaatggcttcttcagtatttaatgtattaatctcaacatttatatctttattctctttttttaatttagccgcccacattggtattagaaaatttgttgaaagataatttcctgctatttttaatgtaccatttttgccttttttataattatctattaatgattccattctattttctattttaaaaactgcatctgcttcttttaccaattgttcacctatttcacttaaacaaatgcctctgccctgtggtaagaataatgtaatatcattttctctttcaaactttttaatttgtgctgtaattgctggttgactgatttttaattgctctgctgcaactgttacacttccagctttagctactatataaaacaatcttaatccatgtaaattcatattttctccattcatacattttatttatgaatataataataacatatattatacatatagattttgttttgatatactctttttataaattatcgccggcattttttataataaaatatttaggagcgaactatgggacaaactgttttatatttaattagacatggacaaacaaaatggaatctagaaaaacgaatgcaaggccataaagattcccctttaactgaagttggcatatctcaagctcaaaaattgcgtgatagacttattaatgaaaaaattgatttaatatactctagtgaaagcaaacgcgcttattatacagctaaaatcatccagcataatcgaaacattcctataaacataaagaaggaattaaaagaaatccacatgggaaaatgggagggcatgaatcagacagatattattaataaatatcctgaaacttgggaaaatttttggaataatccttctgtatatgttccaactgatgaaggagaatcttatgaagaattgaaagctagggtcatcccctcaattgaagaaattattaatttaaatcaaggcaaaagtattgttattgttacacatagaattaccttaaaagttattatgtcacatttcatgagtcaaaatatttgtgatatttgtgaaaatccagatatagaatcagctagcctttcaaaaatacacgtagaaaatggagtgccaaaaatactattatacggagatatatctcactataaatagaaattatttatcctaaagtacttttattttaattaatataatgaaaggcagattaaacatctctgtttaacccgccttcatctcttcttttaaatcaagctgacttttttcttaattatcccttcatttttagcttgaactaataacttattatgtaccattctagttttatttatatccactagaaaatctttattatcctcatatataaggtctttatattctgtagcttgatcatgtagaacttctaatgcttgtaatattgttaacatttcaatctcatttaattttatttccatataaaccaccccataaattttatttcaaattatctatatggctatattcgtaaatttatataattacttttactttttcgtaacaaaaattacgacaaaaaatcgcatgcgattttagttaagttctgtattgtgcttcgcactcttttcataggtgtagattttttacgcatctgccttttcgaacgcatgtgagaaaaatttggcaggcgaatatattttcttttttattctttttctacatagaacctacttgaatatgcttttctataaattttctataaattttactttatcataaatttctgaagaataaaaaatacagccaactagtggctgcaaaattaactaaggtatactaatgaaaacttttttacaagacttattataatatagttttctgaacactagcttaacagctaaaatattcttattaattctctactataaacttatcttcatttaaaatatgcttatctatccaatctacaacaaattctaatatcttctttactgactcatcttgatttaaatctatttcgtgtaaatcaatattatcaatagattttataaaatcttcatgtattactttatgtgataagaattttttatatcctacactcaacatatattcctcttcagatttaaaatgaaatatagtatactcttttaattccccaagtatttcagtaattctatcatacttatcaagtataaaatcatttgttaataatttataagcacgatccgcaatctcaaataatttttcatgctgctcatcaatgagttttaccccaacttcataatccgccttccattttaccatcaaatcaccttgtataatgaacatgtagtaaaaattcattatacttttcctttcttaataatttttactatacttaacataagacgctgtggattagttttttcacctatagctagactatttcaattgaggatataaccacagctttatgcttatttgttaattagttagataacgcatgacgttttatatagagcaaggatacatttagcatgaagctacgtggagcatagcggactaaattaaaaaaggagttgttcttatgatttatattggcattgatgtagctaaagctaaacacgattgctgcattattgattcagatggtgttattattaatgattctttacgtatatccaattcacgtgaaggttttgaattactttattcttcaatactttccgtcctacctaacaaggatatttctaacgtaaaaataggacttgaatcaacaggtcattatagcactaatctccaaaactatttgtatgctaaaggctttcacctatccattctcaatcctttagctacaaatcttttccgtaaggctcaaacccttaggaaaactaaaaccgataaaacggatgcactagttattgctaaaatgcttttctctgatgatacaaaatcctattcacctgtatcatatcaaattcaagagctaaagtcactaactagacatagatatcgcttaattggttatagatctaggcttaaactatcaattactagacttatagatataatttttcccgaattaccaaagtatgtttggtctattcatcaagtctctgtttatgctctcctatcggagttaccgagcccgaaggaaatatccaattgtcatttaactaaattgacaaaccttctggctaaatccactaaaggcaaatatagtagagcaaaagctattgaaataaaggaagtagctagcaattctatcggaactagcacacgttctttatcttttgaacttcagcaaattattaggttaattcgatctgttcaagctgaaattgatgctttagataagcaaataaaggatgttgttatagaaatagactctcctttaatgagtattcctggaatctcttatacactagcctcaataattctagctgaaattggagatatagatagattcactgatccagcaaagcttttagctttttcaggacttgatccatcaacatatcaatccggaaaatataatgctacacatacacctatggttaaacgtggttctacctacttacgttgggctatattaacagcatctagaactgtttctatgcgtgattccacttttggggattatcttgcaaagaagcaaagtgaaggcaagcattactatattgctatgagccatgtagcaaaaaaactaatacgtgttattttttatcttttaaaaaccaatacttcatttgtttcacaaatttaattccttaattttccaagcaatgtgattgctttatttgtcatgcacttttttattgactaaaaaatataatttttttattaacttatattgacttcatatagttagtctcaagtaacaaaattctctaatattttatcatattgtggcaatatatcatatatttttaatacttaatgactctggaaatataaagtataattaaaaatcgcttttgttcaagcagtaataaactttattatcattcgctttagcatacttaaatccagacttttcaattgctctcttagactgattattgtttacaaaatgagaacacacaatagaatcaagctcttcttcattaaatccataactaagaacttgtctaagcgcttctggcattaaaccttgcccccaatatttttgtgataaaacacatcctatttcttttgaatttatatatattccttctgaatatttatgtaattcaatccatccaattactttattaatattttttaattcaactgcccataatgaatcggaagaatctatgataaattgcttcaaaatctttaggctctcttctttgttgttcttcacactaaagcctgctaaatttgcaactttttcatttgacataaattcatgtaaatcatctaaatcagaatttttccaaggtcttaaaatcaatctatcactctctaatattgtcatttctaatttatcctccaatattttgtctaaattgcatattcacttcagcaaagcaatatcacttatatttctatacttactaattcttataaattccctttagagtatatcgctccaaaatatgtccatccatttcatgatataattcatttaataaaaatcctttttttagatttagcagtttatctaaagcaaaaacatgaaactcataaacatgtgctttatctggtggtgtcataccaccataataacaagaaagttcttttgattgctgattaccctgcaagctagtccagctatttgtgccttgtataaaatcccctgctgtctggctctcattatctttcaattcactccttgtaatattggctgcaagccaatgtatccaagcaaaacctcctgttactggataggcatctttatcttctaatactattgcaaatgaagcagtatttactggagcatttgcaatttttaatggaagagaaaaagttgggactccattctcattaaaatgttctccacgactaccatattgatcttgaataatcccatttataatacctgcacttgttgctatcatatattacccccaaagctattatttataggcaaattatagcaaagagcttttataacgtaaattactaacttttttgtgggtattactctggaataacctttttttcaatcaatgtcttttccataccatgttcctttaagtaatcaattccaatagattgcatgatttttagggcatctataatcttcattcccatatctattgttaaagagtattccacacgaagaggataaccatcaaatgatttcttttccacaaacccataatcaattaattcttttaattgctctaatagcattttttgattaattccatcaatatctctttctaatttagccaatgatgtaggggctaatcgcaatcgccataatataatagatttccattttcctttaatcatatcgtgtactagttctaaaggacacgtatattcttctcttattttcattgtatctcctaaaaataaattcttatttatactaactttgcaggtaattgacttttatataatcaatccatttatcttgaagctcctcttctgtcattccaaaaatctctacaatactattgggttgctttattaaattgcgtaacttttcatatccaaatagtttaattattgattctactatggtatatgagtattgatatccattacgtgcaaaaaaggtttcaaaatccgctcctgtatctagttctttaaatgtaggaataatattattttctaatccatttttgacagtttttattatccagttttcattattgtcttttgcttcataacacgctattccttcatttagccatctaggtgtattatcatttatcttatttactatcatgtgtacaaattcgtgaaccgctgtatttaatacgttataaaaatcagaacctggtggtggatttaaaggtgatgctattacaattttacccaccccaagtccgcctctcacccagtcaggcgcatttggaaatcctaatgccatatgaagttcattatggtctgggtgtatttctatagttaatttttcgttaagctgcttatttaagttattagtaatcctattatagttatcttcaaggacattatacactttatctatgcatttcttatcaaattgagtataacaaattatgaaattttgagtttcttttcttaaattcagtttataatctttctctctattaacatttttaattcctagactatctaagtattcctctacttttcctgccattttaattttactcctttaatgatatttttacatataaacacagctccttatgtagcaatcatatttattcaataataatacaacttctctatatattaattttaaattttcaataatattatagaattgcatatttgtttcataccccttctaattatctttctatacaaagttaaaataattaattacaataagaatcatcaaaactttaacgatatttgcgatagtagaagtaactatcgctctccatattaggttgtttgtgaccaattggagttcttttctcaaacaatttaaattgcgctttttctgccactttacatgacgcgatattttcacaatcgatagtaagaatcatatatggaatgtctgatacgcttatgcaccattcatacaatgctcttagtgcttctgttgcatatccatttccagcatgatcttcatctataaaatatgccatttcaacttcatttagtgtatcttctaatcccattccaaccatgccaattaactcatctgtttcctttaatgtcacagcatatcttttattttcataaatatcctttgaatccttttgtgtcttaagccaatcaatatagcctgaaagccttcctttaacagtgctattttcagaccagtctttcataaaccttattacatctttttgccatatgattttcattaaattttctttatctttatgttgaaaatcacgaataattaatctctctgtatttattagcatatttttcacctcatcttaaaataatacttttttcattctctttattaatataaaactctctataaaaatataaattatcataataattaatggcataattaaattagctatattaaaatgcataagatctaaatatgctgttgaaacttcatttataggaggaaaaatccacatcacatattttgaatatggaacctcattaattactggtcctttaattatgctcattaatacaataaagattgcacctagtattgccatttttctatttgatattattcttggttgtaataacataccaattaatgctcctattattgataaaaacatgtggataataaatgaaacaactatatcgctgaatgtaacaggatatttaaaaacattacaaattaaattataaataataggaagtccaacagataatatagaaaaaaatactcctactacacccataaaaataattttagatacccaatagcgtgtatggctctttaattttaatattaaaacttcttccgcaattaattctatattgctgcaataagtaaaaccaatccatgtcattaaggcaaagagaaaggctgctgaagataccatgctgcctacaatatcaagtaatcttatggaataagccattaccatatatattataaaaataaaaaaaggcattatatatttgtgagacttcatgtacattttaaaattatattttaatactgatattaacataagttacgttccctttacctttcaaaatactttaaagtgtaaccactattaatcatttctgttaaaaccctattgctttcgcttatttttgttttgaattctatataatcttcattttcatgatactcgtagatcccattaatatttggagttacaaaggatttatctgcttcttttctgtaaaaagtcattgaagcatatttctcagagctaatatctgcccttttaatttcgaatattttagaatctttaacctgtaatattctactagataattgatctattaaaaatacttcgtgacatgacattattactgtaacgccgtcttttataagctctcttaccattctaataaacgttttttgtgaatcactgtcttgtccagataatggctcatctaataacaaaatatctggttttgacaaaagtgcctgaactaccgaaatcttctgcagagttcctttagataagtttttcatagaagtgtttatcatattttctaagttaaactccttatataagtaattagttttcttcacaaaatcatcttttgatattccttctatctctcctattaacttaatatattcacttgcttttatgttaagctgtgaaaaattttccggaatataattaaatttaagatttttatctctaataacctctccagaagttattcttgtaagaccgcacaaaatctttattaatgtgctttttcccataccattatgccctgttaaagcaatactttcgcctttcattatatctaaacttacatcatcaaaaatcaatctatcatcatattttttcactaaattttttattcttattattggtatattcatactattcccccgtttatcataataagcatgaccatcctcgtattataccactttttacataataataaaaataattacaaacactacgagtttaatatactctttaaagcttaatgcataatagttatatcgaaccatttattaaatattccatgttacataaattataaaatagtagctccactaattggctctactattttataacttgtcttatttcttgtaatctgtatttcaaacgtattttaatgctaaattattaaattctatttttaattttgaattgttaagcttagctgcgattggagaaaatatatcttatataataatcaaagaatcggttaaaaatcaaatattaagcaataaaataaacccaacagaaaacttatattctctgttgggtacagctttatatataaataattattttgcagttctaatacatatttcattaaaaataaagaatgaactatattatttataacttatctatactattaataatctatttcaaatttttaccagtgaatgctaaaggtagaagttcttctaatgtatgttctaaatattcttctgtgcttttagcaataattattttaaaagtctttagatcacagaactctgccataacttgcctacatactgcacaaggtgcacaaaaatctccttcgccaggtttcaccccttttttatttcctactactgctattgcagtaaattcttttttcccttcagaaattgctttaaagaaagctgttctttctgcacagtttgttggtgtaaatgctgcattttctatattgcagccctgatatattgttccatcatcacaaagtaaagccgcacctacattaaaattagagtatggagtataacaaaacttttgtgcctcaaatgctttttctatcaatacttttgcatctatcatatttcattaccaaacctttctttaaaattccaatatattactatatattgaggaattaaattgtaccactattatacaagcatgtaaatataatttcatgtagatatccaactctaaaactaaatttatgtggtaacttaccgaaatcataaatattttgttccgaaaagctatgaaaatatcgctgaagcttataagcagcaggttgtatccattttagcatgctccaactttcctaggggagctcgactcattacattcgctgaggaagttcgagaacccaaaataaaattttgtactctcacttcacaagctaaaatggaacaacctacagctaagaacctttaatagctcattttcaaatgttttctccacaaatatatttatgatttctagtgaagatacgaacttaaagtcttagcaactttataaatatgtttatctgcatagatgtcacaactaagttccaaacttatgcatatagctctccgaaataaggattatgctgttgtctcagtttctacttttctcctaaatcttataatctgttttccatcagaaataaagagccctaataatgttaaaataattcctataattgaaataaaggttatgttctcatgtaaaataacagcagatgaagcagccgttattacaggtaccatataaatatatatgcttgttttcactactcccaaaatcttaactgaccaattccaagttacaaagcataatgcagatgctccaaaacctagatataagatgttcattagatttgatacattagtaaatctatataattgaagcttaaaatcacaaataaatatggcaggtatcataaaaattaatccatagaaaaatactttgcgagtacagataatggtattatattgaaattgactaattttcttcatgacaacagaataaaccgcccataaaatagcagcaagtattgctaatatatcaccaaatggatttaattttaaaacaaattttccgttaaactctataagaagtatccctattattgctattgtaagtccaataaaaaagtatgatgttaacttttcattatctaaaaacagattggcaaaaacagctgtaaaaaatggagcaattgaaataattacacctacattagttgcaagggtatagctcaatgcgatattttcacaaaggaaatacaatgttactcctgctaatccagctgctgcaaaataaagttcttgtttaaattcaacctttttaatatgatatgggcatatgcaaagcaatgtaagatatccaattacaaatctaaagattaaaatttcaattggtgtaaaatcttttaataatactttagttgaaatgaaggttgtcccccaaattaatattgtcataactgctgataaatgtcctaccttaacttttttattactcattttctttactcctacatctattaataaaaatattcatatattgctttggcgttaatccaattaactttttaaaaaagtttgtaaaatgactttggtctgtgaatcctgttttgaacgctacgtctattggggcaactccttgttccaacatttttttcgccttgccaatacgaattgtttgaagataattatatggtgatattcccttttgtttagtaaaagagtgtaacaaataatatttacttaatccagttaaattgcttaattgattcaatgtgatattttccatataattattttctagataatcgcacactgtcttaatttctgcactagcttcctgtatagtcatttcagaaactggatttgaatattcccttatcaattgctccattatgaatagaaacaattcatctttttttaaattcttctcctcatccattatcataagatgtaactccttcaaagaagatgtaagttcattacggaataaaacaaattccataaaattaggcagatattcttttcctgttatttcaaatgtgatttttttcataacatcttttttaacattaatgcacctataatcgagtgtcctgtcatcaatttgttcgcatgtatgaatatcaccaggattgaacactattaaatcccctgtttctataatgtactgcttatttttgcacgacaaatatcttttcccattctcaataaacccaataacatagtagtcgtgaaagtgattgggaaacttctgcatgatacctttaaagttataagcttctatgcttagctctgtatcaaaacaaacagtcctaacttcgtttaacatctattttcctccttttccttatgtctgttttctaagaatatcatagaaattcaaatagttcttgtatgatgttgttcagctttttatttacaatgatttcagaaattaacatgtacaataatagatttttatatatcttaccgccatctatatggaaaccttttaaatattatgatataatttccatgtataattcaatagttttgtgggctactggtatcacttacctctttttttgaagggaggtgatacttatcagtaatgacgttttaacattgctatttcaaggtggattattcttaatatcgctgttaacattaatagtggttcttatagaaaaaatctcaaaaaaatagtagccccaggttcaattggaaggctactattttttaaataaaaatcttagtgataccagttgcctaagcaactagaattatatactatagtgaaaagcatattgcagtatgtttttcactattttcatttttatactatttacttacactatatgcaagttttattaaataaatcatagatttataatcttacttatattatatcaattttcactaaaaaataaacacatatttttattgaaatctacatctataaaatatcctatatattattatattccctaaggttattagtcctactcagttatttctattctattcccatctggatccaaaatacaactttcataatatccatctccagtatagcgaggttcacttactaccttataacctgaatttcttaatgactcagtaagattattaactttttcaacactgccaacagaaatggcaatatgaattagtccaatatattgattaatagtatcatttaaatttgaaggaattgttggcatctgcataacttcaagtcttgctcctgaatcaaatttaataaaatatgattcaaattgttttgtatgattaatatatttatctccagcaacgccttcaaaataagtaacataaaagtctcttaatttttctatatccttagtccatatagccacatgttcaattttcatatatacacttcctttacctttagtattaactttaaatttctgtgctaatttattaaatttaattaaacgttgtaatcatcaacatcgaactcattgtttttataataatatttgcggtcttcttctgtaatctcgcgtacaaccttacatggatttcctactgctatcacattatctggaatgtctttagtcactacacttccagaaccaattacaacattatttccaattttaacacctggatttattacaacacttccccctacccacacattatcaccaattataacgtcaattccatactcataacctgaatttcttgactctggatgaattggatgtcctgcagtataaattgatacattaggtgcaaacaaaacattctcacctattattacctttcctacatctaatatcgtgcagttataattagcaaaaaagttattacctacttcaatatttttaccataatcacagtgaaatggctgctctatacaaactttatcaccagtcttacctagaatatctttaataagttcctccattctattcatttcatctggacgaagtaaattatattcatggatttttagcttattttccattctttcttcactaagtccatctaaccaagctttatatggtaatcctgctaacattctctccttttgattcatctttctattccccttttctttatctatataattattttattcttcaccttgaggtactttgtatttaaatatagcaattaatattaaagaaacactataaacaactgtaaatgccaatgaaaatgctattccatttctcattgttgctgaatatatcattcctgcaataactcctgcaatgccttgtacaaagctaataaatgatattccttctgcaattagtttatcatctaaatgcctctgtgcaaatgcaaatggaacaacttgatgtattccaactccaataccaattattgcagtggatagtataatcacaaggtaacttgatataaacaatgttaatacataaataagtgttcctattaaaatagcccccgacatcaatataaaaatcgtctttgtacaacctttctttgaaatatatatgccagaggcactcgataatatcataacaaagatattgcaaggagcaagaacaacagcactaatgctagtgtttgctcctaatactgtctgtgcataaagtggtatgtaattaccactacatgaaatgcatgtagctataaaagtaattaaaataattgttagatatccattttgttttagtaattttacaataaataattcttctttattgcttctatttatatgaagattttctcctttatcatattcctttatgctgctttttataatgattctatttttggttttacttcttggcataaaaaatcccacaaatatcattccaattataaataaaggaaacagtatagcaagggatattctccaactccatctctctgtaaatattccacaaagtactggacccaaaatgagcgtcaatgaataaactgtctgcataattccaatcctaactggatactcttcttcagatactatatcgtttatcatagtaaatacatttgcaaaaaatagtccccaaaagaaacctgaagctcctctagcaataagaaatacagtcccacttgatgctgctgcactaattccaacgcttaaagcaaacgcccctacactccatatgtacaattgtttacgtccaaaatattctcctgctctaccagaaataagtaatgatatacttcttgctagtggttctattacaaacatagcattaaacaaatctatcctaccatattcacgaaaagctgtagccgcataaattcctgtgctgccaacaaggtaggatgcacatatatttattataacaagcccaataaatactatatttgctctctctaagtgtaatcttttggctttcatttctctttttccaccttttcaaattaatattactacagaaaagattttaattctgatataatattctcttcattcctctcaaatcagttccccctatagatatactaggtttagtttttccatgaaaattactttcttcttcaattgctttctttcattgtttatattataataatattccataattactactaaaaatataagaataagatatatttttataacaatagtatattaattgatgttcataccgtttggagggaaagctatgttaaagatgacactattaaatgataactcagaagttgtatcttataacttcgcggattttcctattcgtgcaaaaaagtccttgctttcagactatacagctatgtcagctgctaaccattggcatactgactgggaattcatcttacttttagatggtaaaatgtcttattctgtaaatggtaagagttatgaattacaagaagggcaggcaatttttataaattctgagcagatgcattatggatattctgctgatggttctgattgtaactttatatgtattttgtttccgccctccattatttctagcattacaagaatcaaggaaacttatatactgccagtatgtgaagacacatccaatccattttttatattgcacccagaaatcacttggcagagaaacttgattgaacttttgaaaaacgtttatgagttatgtaatgaagaaaaagatggatttgaattacatatcatgagtctttttaatacaatatgttttagcctttataacaatataaaagatagcatttccattcaagaaacagctgatgataaaaaacttgaagctatgcataatatgacgggatatatacagaaaaattatcaaaaaagaatcacgttaaatgagattgccgctgctggaaatgtatgtcgtagtagctgttgtgatatttttaagcttattttgaataagactcctgtttcctatttaacagaatatcgtctagaaaagagtattgaactcctaaagatttcttccctttcagttactgaaatagcacttcaatgtggatttacaggttcaagctattttacggaaatatttcataaaacaatagggtgcactccttctcaatacagaaaaaagaaatttaataacctatgattaaaaatacgaaaaatatcagtgtatatgttcaatataataaatctacattaaaaatctataaagccaatctctcaatcaaagctaaaatgtataaacttaattgcagcctatatttttcatgacaaaataatgtaaataataactatatggctatcatcatgatagcttattttgttatggtatctaaaatagcccgcccatatttatgctataataaatttagtatagcaatcgtaaattataataaaagaaaggggtaatactcttggataatataaaatgtgaacttagagtatatagttttaaaagtaatactcatgctcatgaatatggacaacttatcttgccacttaaagatgccctttctatagaaactgattaaaagaaatagcttatataaagagaggatatgcttttgtatgaaagaaaaaatcactaaattgataaaaaactttgttaaagaatatgagaagcaagatagcatttcaacaaaatggggtgatcctttaataggttttgctgatgctaatgatccttacattttaaattttaaggaacttattacaccaactcataaattaccaaccgatgtactttccgatgcatcaattgtcatagcgtactttgtcccattcactaaagaattggctagaaccaatggaactcctggtgatatttcctctcctgaatgggcattagcttatgaagaaactaacgcaatgtttgttaatcttaatgaatatatgatatcagaactgcgaaaacttggatataatgcagatatttcgccagaggcttctacatttgaccagaagatattaaaaagcaattggtctcatcgtcattttgcaaaagctgctggtcttggaaccttcggtatcaataacatgcttataactaagattggatgctgcggaagatatagcaccattgtaacaaatctagatgtaaaagcagattctcctttaaaagaagaactttgcctgtataaaaagaatggaagctgtggagtatgtgtaaaacattgtccatcaggtgcattgactttagatagctatgatagacataaatgctacgtcgtactaagaaaaaatggagaattatatacagagtttggaagttcttacaccgatgaatctggtgatgaaccaaacagtataggtagtgaagtatgcggaaagtgcgtagtaaatacaccatgcacattttttatcaaatagcttgcatctatgaccttcccgctccctactataaatggactatttaataaactcaaaagtttatatataaaattcttctaccataatataaaatgctctaaaattaagaacccaaatataaaacttggcttctcacttttagggcataactttttatgaatatttttattacatcctcacataataattttagttatatagtatataccttaaaattatgaaagaaggcttattaaatgaaaaaattcatacatactctttctgactttttactcctattatttacctttaatacaataacaattaccgccagttgaaaacttactcccaaggcttttatgccatgaaagatttgaatttaagagaaaatgttagttataaggttcagaatcatgaaccctacgttgaagggctattaatagttgttgatgctgatagaaaaatacaacaacttatccgaatacctgctaactccactgaaatccctatagcacctcttaaatatgattataaatttataatatataataatattcttttgacattttcttaaaaaggcacttctgcagtgcccttttaaattactttaatgctcacttttctaaaattatacgttatttcagctgtaaaatatatcccaaattctctttgacaataagataaatataaattcttactatgatgtaattccattaattacttttgctttaaggttacttaatgataggttggttttgcccatcttattttaccaatcactagatcctgaatctgagctagacgatgaatcatctgaacttgaacttgagtcgctatctgaatcccaactagatgatgattcttctgagcttgaacttgagtcgtcatctgatccccaactagatgatgaactatctgaatctaaacttgaatcgccatctgagtcccaactgcttgtactattatctaaatcccaattaccagataaatatactgaatctctacttgaatctgatgatgagctggactccttagaactgttgttatccaagctattggaagtgtatgatgaagtttccctgtaatgttcgttatcatctctatatccatgttcttcatgataatgctcattataatgttcatgatgattacgtgaggattcagataccatttcacctacgatcataccttctagaaaatcattattactattgttgttatttattatagtagtattatttacatggctacctgaaggatatgtatcataattgtttgatacattatctgatgtccttgttgagttattattaaaagccgaattattgttattaaaattagaagaagactcattattgtttctataatccgagtcatttccatgacttgaataattttgttttgtttcacttttacttatattacatgaatgaaatgagttatcatcagaatctaaatatgattctaaattattttcctcagcaaatttcctttttctttcttcataatctttattcattttattttttattactttaaataatattattgcaattactatgatagctattataatgataaataccccaaaataatttgttttatgcgatacagtatttgaataaccatcctttaccacttcagctttgccagtattaactgccttagttgtaactttttcatcaagtgcctttccaactttcataattccgctatcaaaattgttagctttaaagtctgaatttggtaatgctacaatattagatatatctgattgagacaaaatatcatttgccttatctccaactaaaattttattcttcttatcacctattgatgttacaaataaaatgtactgctctccacttatattgttctttgcatattctttagagtaatcatcaatactttttccattcaatgttttgactacatcaaatttaactattacatctgtattcttttctatctttgttaagttttcttcaacagtattaatagtatcttgttttaggacgttggcatcatctactatatgcttacccgctgcatacaccacaattgacattagtaataataatattaaacttgacaaaataattttctttactttcatctcttttcctctctttattataatttatttttgatatagttagtttatatactataaatcaactataatttgccttaattctaaaaagtctattgagtattcaattcacttaaattcagatatcttttcaccataatacttttctatttcaaaattattactcttgattatattaattattaaatttaaaaattactgtaaattgttatgaattatatgtttatcgtcttcatatctacccaaatcagccgcttgtcaactttaactttttctgcttaattctcatactctatacactattttattctctacttttcactttaaatgcacaacatgctaattttttctgctattatttattttaaatataatatgtaatcctctagcacttctcagtattttaggcataaaaatgttccttttaatgtgaacagatttctattttttatctgtttacattaaaaggaacatctcacttctaaaataattctatgcttatgtattgtataaaactacgctttaattatttcactatattggatattatccttatagttatcaagaactacttttctaatatccataatatcgcccggaagattatttatgttaaaccattttaattcagaacatttatctggttccattatcttaggaatgccctcatacttattaacttcaaaataaatgtcataatatgttcttcctccagtatcgttaacacgatgggataaatgagcaaaagataattattccctttttaaaaggctatgcattaaactcaagcttttttacttgtaattgctttaatatttaatataatacatatcaaacttataataagactaataatagatgtgtaataaaagaaagagccatttccatatatctttattaatccaaaaaagcaatacgcaggtccaatatcaccaccatcaaaaagaaatacattaaaaagaatatatgttaataggccaagataaaatgatttcttttgtttaacttctccttccttgcaactcgttaaaacataaattatacctgaaaccaatattatagtgttatatgcaaaaaatgggataataaagattactcttatccaccctaagtttaaaatatacgaaataatgccaactataactgttaatactactagcactaaatcagctgcttgttgtttagtttttatcaattctaattgcctcctaatatcacaagttaatatttatttaaaagttaatactttttacaatatgatataaaaatatatactgttttgctctcttattaatacgctactattctgaaccaaacataatataaattgtaaacgtattgttattttatctttttattattaaatggcaatataaaaacaataaagtaaaaagttgctccagctaaaaaagatttaagcaaaaagtgatattctcttgaagaaaagttttcaataattgatgtgcaaataatattaaatactgcagcaattagaaataagctaattctcatatgtcttttactatttattaatctttctatccctaatttttgacagaaaaagtccgttataaaatatgctacaaagcaagctacaaaccctaaaaacaagctattcataaagatcattccccttataatataaataatgcaatcaagttattcttcctctatatttctattatagcatatactgtaaatgatttttttgtttgtccaaaattcaaaaatgtatcatttatttcttctactaaatatttttacatatatctgtagcaaacagccacttataattgctaatatagctaattatattgtgtttcaatttgataatatcaaatcctatatgaaacgttaaaaaaataatacgaatatagttagagaatatattattcgaaacattttattacttttcatatattatcactctccaattaaaatactattattaattatgcggttagcttgtcttacctgattccccttgccaggacactaatcattttaaactagaattatgcttttaatattccatgatattattttaatattacttgttcaaggctaagcattcctgtaataaataatataaaaaagtttttattgttttaaattgtcttttctacctaaaatataatgaaaagaaataataaatggaattatacaaataaatcctaccaacatttgcattggaaagttaaaatagattcttttatggtaataagcatttgtagatagaattgataataaatatcccaaaattgtacac
